(19) United States
(12) Patent Application Publication
(10) Pub. No.: US 2003/0190640 A1
(43) Pub. Date: Oct. 9, 2003

(54) Genes expressed in prostate cancer

(76) Inventors: Mary Faris, Los Angeles, CA (US); Cecelia I. Pearson, Palo Alto, CA (US)

Correspondence Address: INCYTE GENOMICS, INC., 3160 Porter Drive, Palo Alto, CA, 94304, US

(21) Appl. No.: 10/252,157

(22) Filed: May 29, 2002

Related U.S. Application Data
(60) Provisional application No. 60/295,048, filed on May 31, 2001.

(51) Int. Cl. C12Q 1/68; C07H 21/04

(52) U.S. Cl. 435/6; 536/24.3

(57) ABSTRACT

The present invention relates to a combination comprising a plurality of cDNAs which are differentially expressed in prostate cancer and which may be used in their entirety or in part as to diagnose, to stage to treat or to monitor the progression or treatment of prostate cancer.

[0001] This application claims the benefit of Provisional Application No. 60,295,048 filed May 31, 2001.

### FIELD OF THE INVENTION

[0002] The present invention relates to a combination comprising a plurality of cDNAs which are differentially expressed in prostate cancer and which may be used entirely or in part to diagnose, to stage, to treat, or to monitor the progression or treatment of prostate cancer.

### BACKGROUND OF THE INVENTION

[0003] Array technology can provide a simple way to explore the expression of a single polymorphic gene or the expression profile of a large number of related or unrelated genes. When the expression of a single gene is examined, arrays are employed to detect the expression of a specific gene or its variants. When an expression profile is examined, arrays provide a platform for examining which genes are tissue specific, carrying out housekeeping functions, parts of a signaling cascade, or specifically related to a particular genetic predisposition, condition, disease, or disorder.

[0004] The potential application of gene expression profiling is particularly relevant to improving diagnosis, prognosis, and treatment of disease. For example, both the levels and sequences expressed in tissues from subjects with prostate cancer may be compared with the levels and sequences expressed in normal tissue.

[0005] Prostate cancer is a common malignancy in men over the age of 50, and the incidence increases with age. In the US, there are approximately 132,000 newly diagnosed cases of prostate cancer and more than 33,000 deaths from the disorder each year.

[0006] Once cancer cells arise in the prostate, they are stimulated by testosterone to a more rapid growth. Thus, removal of the testes can indirectly reduce both rapid growth and metastasis of the cancer. Over 95 percent of prostatic cancers are adenocarcinomas which originate in the prostatic acini. The remaining 5 percent are divided between squamous cell and transitional cell carcinomas, both of which arise in the prostatic ducts or other parts of the prostate gland.

[0007] As with most cancers, prostate cancer develops through a multistage progression ultimately resulting in an aggressive, metastatic phenotype. The initial step in tumor progression involves the hyperproliferation of normal luminal and/or basal epithelial cells that become hyperplastic and evolve into early-stage tumors. The early-stage tumors are localized in the prostate but eventually may metastasize, particularly to the bone, brain or lung. About 80% of these tumors remain responsive to androgen treatment, an important hormone controlling the growth of prostate epithelial cells. However, in its most advanced state, cancer growth becomes androgen-independent and there is currently no known treatment for this condition.

[0008] A primary diagnostic marker for prostate cancer is prostate specific antigen (PSA). PSA is a tissue-specific serine protease almost exclusively produced by prostatic epithelial cells. The quantity of PSA correlates with the number and volume of the prostatic epithelial cells, and consequently, the levels of PSA are an excellent indicator of abnormal prostate growth. Men with prostate cancer exhibit an early linear increase in PSA levels followed by an exponential increase prior to diagnosis. However, since PSA levels are also influenced by factors such as inflammation, androgen and other growth factors, some scientists maintain that changes in PSA levels are not useful in detecting individual cases of prostate cancer.

[0009] Current areas of cancer research provide additional prospects for markers as well as potential therapeutic targets for prostate cancer. Several growth factors have been shown to play a critical role in tumor development, growth, and progression. The growth factors Epidermal Growth Factor (EGF), Fibroblast Growth Factor (FGF), and Tumor Growth Factor alpha (TGFα) are important in the growth of normal as well as hyperproliferative prostate epithelial cells, particularly at early stages of tumor development and progression, and affect signaling pathways in these cells in various ways (Lin et al. (1999) Cancer Res 59:2891-2897; Putz et al. (1999) Cancer Res 59:227-233). The TGF-β family of growth factors are generally expressed at increased levels in human cancers and the high expression levels in many cases correlates with advanced stages of malignancy and poor survival (Gold (1999) Crit Rev Oncog 10:303-360). Finally, there are human cell lines representing both the androgen-dependent stage of prostate cancer (LNCap) as well as the androgen-independent, hormone refractory stage of the disease (PC3 and DU-145) that have proved useful in studying gene expression patterns associated with the progression of prostate cancer, and the effects of cell treatments on these expressed genes (Chung (1999) Prostate 15:199-207).

[0010] The present invention provides a combination comprising a plurality of cDNAs and individual cDNAs that can be employed for the diagnosis, prognosis or treatment of prostate cancer. The present invention satisfies a need in the art in that it provides a set of differentially expressed cDNAs which may be used entirely or in part to diagnose, to stage, to treat, or to monitor the progression or treatment of a subject with prostate cancer.

### SUMMARY

[0011] The present invention provides a combination comprising a plurality of cDNAs and their complements which are expressed in prostate cancer and which are selected from SEQ ID NOs:1-501 as presented in the Sequence Listing. In one embodiment, each cDNA, specifically SEQ ID NOs: 1-56, 87-153, 164-349, 370-414, and 437-501, is downregulated at least two-fold; in another embodiment, each cDNA, specifically SEQ ID NOs:57-86, 154-163, 350-369, and 415-436, is upregulated at least two-fold. In one aspect, the combination is useful to diagnose or treat prostate cancer. In another aspect, the combination is immobilized on a substrate.

[0012] The invention also provides an isolated cDNA selected from SEQ ID NOs:14, 26, 40, 52, 55, 60, 65, 68, 73, 79, 82, 85, 92, 110, 112, 114, 115, 117, 122, 125, 126, 130, 136, 137, 139, 141, 143, 144, 145, 146, 147, 160, 164, 166, 167, 168, 190, 191, 194, 195, 199, 201, 204, 211, 212, 222, 224, 226, 229, 233, 234, 240, 243, 245, 248, 250, 253, 254, 259, 264, 268, 269, 270, 272, 276, 278, 279, 281, 282, 284, 285, 286, 293, 296, 297, 299, 300, 301, 302, 306, 308, 312, 313, 314, 317, 319, 321, 321, 322, 322, 323, 324, 325, 326, 330, 331, 332, 334, 336, 337, 338, 339, 340, 342, 346, 353, 355, 357, 361, 365, 366, 371, 372, 376, 380, 383, 385, 386, 387, 390, 399, 400, 402, 405, 406, 408, 409, 410, 412, 413, 417, 418, 419, 420, 422, 422, 424, 426, 438, 444, 445, 453, 456, 460, 461, 471, 479, 480, 487, 490, 492, 495, 496, and 497 as presented in the Sequence Listing. The invention also provides a vector comprising the cDNA, a host cell comprising the vector, and a method for producing a protein comprising culturing the host cell under conditions for the expression of a protein and recovering the protein from the host cell culture.

[0013] The invention further provides a method to detect differential expression of one or more of the cDNAs of the combination, the method comprising: hybridizing the substrate comprising the combination with the nucleic acids of a sample, thereby forming one or more hybridization complexes, detecting the hybridization complexes, and comparing the hybridization complexes with those of a standard, wherein differences in the size and signal intensity of each hybridization complex indicates differential expression of nucleic acids in the sample. In one aspect, the sample is from prostate, and differential expression determines an early, mid, and late stage of the disorder.

[0014] The invention still further provides a method of screening a library or a plurality of molecules or compounds to identify a ligand, the method comprising: combining the substrate comprising the combination with a library or a plurality of molecules or compounds under conditions to allow specific binding and detecting specific binding, thereby identifying a ligand. The library or a plurality of molecules or compounds are selected from DNA molecules, RNA molecules, peptide nucleic acid molecules, mimetics, peptides, transcription factors, repressors, and other regulatory proteins. The invention additionally provides a method for purifying a ligand, the method comprising combining a cDNA of the invention with a sample under conditions which allow specific binding, recovering the bound cDNA, and separating the cDNA from the ligand, thereby obtaining purified ligand.

[0015] The present invention provides a purified protein encoded and produced by a cDNA of the invention. The invention also provides a method for using a protein to screen a library or a plurality of molecules or compounds to identify a ligand, the method comprising: combining the protein or a portion thereof with the library or a plurality of molecules or compounds under conditions to allow specific binding and detecting specific binding, thereby identifying a ligand which specifically binds the protein. A library or a plurality of molecules or compounds are selected from DNA molecules, RNA molecules, peptide nucleic acid molecules, mimetics, peptides, proteins, agonists, antagonists, antibodies or their fragments, immunoglobulins, inhibitors, drug compounds, and pharmaceutical agents. The invention further provides for using a protein to purify a ligand, the method comprising: combining the protein or a portion thereof with a sample under conditions to allow specific binding, recovering the bound protein, and separating the protein from the ligand, thereby obtaining purified ligand. The invention still further provides a composition comprising the protein and a pharmaceutical carrier. The invention yet still further provides a method for using the protein to produce an antibody, the method comprising: immunizing an animal with the protein or an antigenic determinant under conditions to elicit an antibody response, isolating animal antibodies, and screening the isolated antibodies with the protein to identify an antibody which specifically binds the protein. The invention even further provides a method for using the protein to purify antibodies which bind specifically to the protein.

[0016] The present invention provides a purified antibody. The invention also provides a method of using an antibody to detect the expression of a protein in a sample, the method comprising contacting the antibody with a sample under conditions for the formation of an antibody:protein complex and detecting complex formation wherein the formation of the complex indicates the expression of the protein in the sample. In one aspect, the sample is from prostate. In another aspect, complex formation is compared to standards and is diagnostic of prostate cancer. The invention further provides using an antibody to immunopurify a protein comprising combining the antibody with a sample under conditions to allow formation of an antibody:protein complex, and separating the antibody from the protein, thereby obtaining purified protein. The invention still further provides a method of using an antibody to detect prostate cancer, the method comprises contacting a sample with the antibody which specifically binds a protein of the invention under conditions to form an antibody:protein complex, detecting antibody:protein complex formation, and comparing complex formation with standards, wherein complex formation indicates the presence of prostate cancer in the sample.

[0017] The invention provides a composition comprising a cDNA, a protein, an antibody, or a ligand with agonistic or antagonistic activity that can be used in the methods of the invention or to treat prostate cancer.

### DESCRIPTION OF THE COMPACT DISC-RECORDABLE (CD-R)

[0018] CD-R 1 is labeled: “PA-0027-1 US, Copy 1,” was created on May 29, 2002 and contains: the Sequence Listing formatted in plain ASCII text. The file for the Sequence Listing is entitled pa00271us_seqlist.txt, created on May 29, 2002 and is 1,430 KB in size.

[0019] CD-R 2 is an exact copy of CD-R 1. CD-R 2 is labeled: “PA-0027-1 US, Copy 2,” and was created on May 29, 2002.

[0020] The CD-R labeled as: “PA-0027-1 US, CRF,” contains the Sequence Listing formatted in plain ASCII text. The file for the Sequence Listing is entitled pa00291us_seqlist.txt, was created on May 29, 2002 and is 1,430 KB in size.

[0021] The content of the Sequence Listing named above and as described below, submitted in duplicate on two (2) CD-Rs (labeled “PA-0027-1 US, Copy 1” and “PA-0027-1 US, Copy 2”), and the CRF (labeled “PA-0027-1 US, CRF”) containing the Sequence Listing, are incorporated by reference herein, in their entirety.

### DESCRIPTION OF THE SEQUENCE LISTING AND TABLES

[0022] A portion of the disclosure of this patent document contains material that is subject to copyright protection. The copyright owner has no objection to the facsimile reproduction by anyone of the patent document or the patent disclosure, as it appears in the Patent and Trademark Office patent file or records, but otherwise reserves all copyright rights whatsoever.

[0023] The Sequence Listing is a compilation of cDNAs obtained by sequencing and extension of clone inserts. Each sequence is identified by a sequence identification number (SEQ ID NO) and by the template number (TEMPLATE ID) from which it was obtained.

[0024] Table 1 lists the functional annotation and differential expression of the cDNAs of the present invention. Columns 1 and 2 show the SEQ ID NO and TEMPLATE ID, respectively. Columns 3, 4, and 5 show the GenBank hit (GI Number), probability score (E-value), and functional annotation, respectively, as determined by BLAST analysis (version 1.4 using default parameters; Altschul (1993) J Mol Evol 36:290-300; Altschul et al. (1990) J Mol Biol 215:403-410) of the cDNA against GenBank (release 116; National Center for Biotechnology Information (NCBI), Bethesda Md.). Column 6 shows the prostate cancer cell line in which differential expression was observed. The table is further subdivided by the treatment group and up- or down-regulated expression.

[0025] Table 2 shows Pfam annotations for proteins encoded by the cDNAs of the present invention. Columns 1 and 2 show the SEQ ID NO and TEMPLATE ID of each cDNA, respectively. Columns 3, 4, and 5 show the first nucleotide (START), last nucleotide (STOP), and reading frame, respectively, for the protein encoded by the cDNA as identified by Pfam analysis of the encoded protein. Columns 6 and 7 show the Pfam description and E-values, respectively, corresponding to the protein domain encoded by the cDNA.

[0026] Table 3 shows signal peptide and transmembrane motifs predicted for the protein encoded by the cDNAs of the present invention. Columns 1 and 2 show the SEQ ID NO and TEMPLATE ID of each cDNA, respectively. Columns 3, 4, and 5 show the first nucleotide (START), last nucleotide (STOP), and reading frame, respectively, for the protein encoded by the cDNA, and column 6 identifies the signal peptide (SP) or transmembrane (TM) domain for the encoded protein.

[0027] Table 4 shows the region of each cDNA encompassed by the clone present on a microarray and identified as differentially expressed. Columns 1 and 2 show the SEQ ID NO and TEMPLATE ID of each cDNA, respectively. Column 3 shows the CLONE ID and columns 4 and 5 show the first nucleotide (START) and last nucleotide (STOP) encompassed by the clone on the template.

### DESCRIPTION OF THE INVENTION

[0028] Definitions “Antibody” refers to intact immunoglobulin molecule, a polyclonal antibody, a monoclonal antibody, a chimeric antibody, a recombinant antibody, a humanized antibody, single chain antibodies, a Fab fragment, an F(ab′)₂ fragment, an Fv fragment, and an antibody-peptide fusion protein. “Antigenic determinant” refers to an antigenic or immunogenic epitope, structural feature, or region of an oligopeptide, peptide, or protein which is capable of inducing formation of an antibody which specifically binds the protein. Biological activity is not a prerequisite for immunogenicity. “Array” refers to an ordered arrangement of at least two cDNAs, proteins, or antibodies on a substrate. At least one of the cDNAs, proteins, or antibodies represents a control or standard, and the other cDNA, protein, or antibody is of diagnostic or therapeutic interest. The arrangement of at least two and up to about 40,000 cDNAs, proteins, or antibodies on the substrate assures that the size and signal intensity of each labeled complex, formed between each cDNA and at least one nucleic acid, each protein and at least one ligand or antibody, or each antibody and at least one protein to which the antibody specifically binds, is individually distinguishable.

[0029] A “combination” refers to at least two and up to about 1002 cDNAs wherein the cDNAs are SEQ ID NOs: 1-501 as presented in the Sequence Listing and the complements thereof.

[0030] The “complement” of a cDNA of the Sequence Listing refers to a nucleic acid molecule which is completely complementary over its full length and which will hybridize to a nucleic acid molecule under conditions of high stringency. “cDNA” refers to an isolated polynucleotide, nucleic acid molecule, or any fragment thereof that contains from about 400 to about 12,000 nucleotides. It may have originated recombinantly or synthetically, may be double-stranded or single-stranded, may represent coding and noncoding 3′ or 5′ sequence, and generally lacks introns.

[0031] The phrase “cDNA encoding a protein” refers to a nucleic acid whose sequence closely aligns with sequences that encode conserved regions, motifs or domains identified by employing analyses well known in the art. These analyses include BLAST (Altschul, supra; Altschul et al., supra) and BLAST2 (Altschul et al. (1997) Nucleic Acids Res 25:3389-3402) which provide identity within the conserved region. Brenner et al. (1998; Proc Natl Acad Sci 95:6073-6078) who analyzed BLAST for its ability to identify structural homologs by sequence identity found 30% identity is a reliable threshold for sequence alignments of at least 150 residues and 40% is a reasonable threshold for alignments of at least 70 residues (Brenner, page 6076, column 2).

[0032] A “composition” refers to the polynucleotide and a labeling moiety; a purified protein and a pharmaceutical carrier or a heterologous, labeling or purification moiety; an antibody and a labeling moiety or pharmaceutical agent; and the like. “Derivative” refers to a cDNA or a protein that has been subjected to a chemical modification. Derivatization of a cDNA can involve substitution of a nontraditional base such as queosine or of an analog such as hypoxanthine. These substitutions are well known in the art. Derivatization of a protein involves the replacement of a hydrogen by an acetyl, acyl, alkyl, amino, formyl, or morpholino group. Derivative molecules retain the biological activities of the naturally occurring molecules but may confer longer lifespan or enhanced activity. “Differential expression” refers to an increased or upregulated or a decreased or downregulated expression as detected by absence, presence, or at least two-fold change in the amount of transcribed messenger RNA or translated protein in a sample. “Disorder” refers to neoplastic conditions and diseases such as cancer, and in particular, prostate cancer.

[0033] An “expression profile” is a representation of gene expression in a sample. A nucleic acid expression profile is produced using sequencing, hybridization, or amplification technologies using mRNAs or cDNAs from a sample. A protein expression profile, although time delayed, mirrors the nucleic acid expression profile and is produced using gel electrophoresis, mass spectrometry, or an array and labeling moieties or antibodies which specifically bind the protein. The nucleic acids, proteins, or antibodies specifically binding the protein may be used in solution or attached to a substrate. “Fragment” refers to a chain of consecutive nucleotides from about 50 to about 4000 base pairs in length. Fragments may be used in PCR or hybridization technologies to identify related nucleic acid molecules and in binding assays to screen for a ligand. Such ligands are useful as therapeutics to regulate replication, transcription or translation.

[0034] A “hybridization complex” is formed between a cDNA and a nucleic acid of a sample when the purines of one molecule hydrogen bond with the pyrimidines of the complementary molecule, e.g., 5′-A-G-T-C-3′ base pairs with 3′-T-C-A-G-5′. Hybridization conditions, degree of complementarity and the use of nucleotide analogs affect the efficiency and stringency of hybridization reactions. “Identity” as applied to sequences, refers to the quantification (usually percentage) of nucleotide or residue matches between at least two sequences aligned using a standardized algorithm such as Smith-Waterman alignment (Smith and Waterman (1981) J Mol Biol 147:195-197), CLUSTALW (Thompson et al. (1994) Nucleic Acids Res 22:4673-4680), or BLAST2 (Altschul (1997, supra). BLAST2 may be used in a standardized and reproducible way to insert gaps in one of the sequences in order to optimize alignment and to achieve a more meaningful comparison between them. “Similarity” uses the same algorithms but takes conservative substitution of residues into account. In proteins, similarity exceeds identity in that substitution of a valine for a leucine or isoleucine, is counted in calculating the reported percentage. Substitutions which are considered to be conservative are well known in the art. “Isolated or “purified” refers to any molecule or compound that is separated from its natural environment and is from about 60% free to about 90% free from other components with which it is naturally associated. “Labeling moiety” refers to any reporter molecule including radionuclides, enzymes, fluorescent, chemiluminescent, or chromogenic agents, substrates, cofactors, inhibitors, or magnetic particles than can be attached to or incorporated into a polynucleotide, protein, or antibody. Visible labels include but are not limited to anthocyanins, fluorescein, green fluorescent protein (GFP), β glucuronidase, lissamine, luciferase, phycoerythrin, rhodamine, Cy3 and Cy5, and the like. Radioactive markers include radioactive forms of hydrogen, iodine, phosphorous, sulfur, and the like. “Ligand” refers to any agent, molecule, or compound which will bind specifically to a polynucleotide or to an epitope of a protein. Such ligands stabilize or modulate the activity of polynucleotides or proteins and may be composed of inorganic and/or organic substances including minerals, cofactors, nucleic acids, proteins, carbohydrates, fats, and lipids. “Oligonucleotide” refers a single-stranded molecule from about 18 to about 60 nucleotides in length which may be used in hybridization or amplification technologies or in regulation of replication, transcription or translation. Equivalent terms are amplicon, amplimer, primer, and oligomer. “Post-translational modification” of a protein can involve lipidation, glycosylation, phosphorylation, acetylation, racemization, proteolytic cleavage, and the like. These processes may occur synthetically or biochemically. Biochemical modifications will vary by cellular location, cell type, pH, enzymatic milieu, and the like. “Probe” refers to a cDNA that hybridizes to a nucleic acid or specifically binds to a ligand. Probes can be labeled with reporter molecules for use in hybridization technologies including Southern, northern, in situ, dot blot, and array, or in screening assays. “Protein” refers to a polypeptide or any portion thereof. A “portion” of a protein refers to that length of amino acid sequence which would retain at least one biological activity, a domain identified by PFAM or PRINTS analysis or an antigenic determinant of the protein identified using Kyte-Doolittle algorithms of the PROTEAN program (DNASTAR, Madison Wis.). An “oligopeptide” is an amino acid sequence from about five residues to about 15 residues that is used as part of a fusion protein to produce an antibody. “Sample” is used in its broadest sense as containing nucleic acids, proteins, and antibodies. A sample may comprise a bodily fluid such as ascites, blood, cerebrospinal fluid, lymph, semen, sputum, urine and the like; the soluble fraction of a cell preparation, or an aliquot of media in which cells were grown; a chromosome, an organelle, or membrane isolated or extracted from a cell; genomic DNA, RNA, or cDNA in solution or bound to a substrate; a cell; a tissue, a tissue biopsy, or a tissue print; buccal cells, skin, hair, a hair follicle; and the like. “Specific binding” refers to a precise interaction between two molecules which is dependent upon their structure, particularly their molecular side groups. For example, the intercalation of a regulatory protein into the major groove of a DNA molecule or the binding between an epitope of a protein and an agonist, antagonist, or antibody. “Substrate” refers to any rigid or semi-rigid support to which cDNAs, proteins, or antibodies are bound and includes membranes, filters, chips, slides, wafers, fibers, magnetic or nonmagnetic beads, gels, capillaries or other tubing, plates, polymers, and microparticles with a variety of surface forms including wells, trenches, pins, channels and pores.

[0035] A “transcript image” (TI) is a profile of gene transcription activity in a particular tissue at a particular time. TI provides assessment of the relative abundance of expressed polynucleotides in the cDNA libraries of an EST database as described in U.S. Pat. No. 5,840,484, incorporated herein by reference. “Variant” refers to molecules that are recognized variations of a protein or the polynucleotides that encode it. Splice variants may be determined by BLAST score, wherein the score is at least 100, and most preferably at least 400. Allelic variants have a high percent identity to the cDNAs and may differ by about three bases per hundred bases. “Single nucleotide polymorphism” (SNP) refers to a change in a single base as a result of a substitution, insertion or deletion. The change may be conservative (purine for purine) or non-conservative (purine to pyrimidine) and may or may not result in a change in an encoded amino acid or its secondary, tertiary, or quaternary structure. The Invention The present invention provides for a combination comprising a plurality of cDNAs or their complements, SEQ ID NOs: 1-501, which are differentially expressed in human prostate cancer cells treated with various growth factors and growth regulators relative to the untreated cells and to normal human prostate epithelial cells similarily treated, and which may be used to diagnose, to stage, to treat or to monitor the progression or treatment of prostate cancer. The composition may be used in its entirety or in part, as subsets of downregulated cDNAs, SEQ ID NOs: 1-56, 87-153, 164-349, 370-414, and 437-501, or of upregulated cDNAs, SEQ ID NOs:57-86, 154-163, 350-369, and 415-436.

[0036] SEQ ID NOs: 14, 26, 40, 52, 55, 60, 65, 68, 73, 79, 82, 85, 92, 110, 112, 114, 115, 117, 122, 125, 126, 130, 136, 137, 139, 141, 143, 144, 145, 146, 147, 160, 164, 166, 167, 168, 190, 191, 194, 195, 199, 201, 204, 211, 212, 222, 224, 226, 229, 233, 234, 240, 243, 245, 248, 250, 253, 254, 259, 264, 268, 269, 270, 272, 276, 278, 279, 281, 282, 284, 285, 286, 293, 296, 297, 299, 300, 301, 302, 306, 308, 312, 313, 314, 317, 319, 321, 321, 322, 322, 323, 324, 325, 326, 330, 331, 332, 334, 336, 337, 338, 339, 340, 342, 346, 353, 355, 357, 361, 365, 366, 371, 372, 376, 380, 383, 385, 386, 387, 390, 399, 400, 402, 405, 406, 408, 409, 410, 412, 413, 417, 418, 419, 420, 422, 422, 424, 426, 438, 444, 445, 453, 456, 460, 461, 471, 479, 480, 487, 490, 492, 495, 496, and 497 represent novel cDNAs differentially expressed in prostate cancer cells. Since the novel cDNAs were identified solely by their differential expression, it is not essential to know a priori the name, structure, or function of the gene or it's encoded protein. The usefulness of the novel cDNAs exists in their immediate value as diagnostics for prostate cancer.

[0037] Table 1 shows those cDNAs having lower expression (two-fold or greater decrease) or higher expression (two-fold or greater increase) in prostate cancer cells following various growth factor and growth regulator treatments. Table 2 shows Pfam annotations of the cDNAs of the present invention. Columns 1 and 2 show the SEQ ID NO and TEMPLATE ID, respectively. Columns 3, 4, and 5 show the first nucleotide (START), last nucleotide (STOP), and reading frame, respectively, for the protein encoded by the cDNA and identified by Pfam analysis. Columns 6 and 7 show the Pfam description and E-values, respectively, corresponding to the protein domain encoded by the cDNA. Table 3 shows signal peptide and transmembrane regions predicted within the proteins encoded by the cDNAs of the present invention. Columns 1 and 2 show the SEQ ID NO and TEMPLATE ID, respectively. Columns 3, 4, and 5 show the first nucleotide (START), last nucleotide (STOP), and reading frame, respectively, for a protein encoded by the cDNA, and column 6 identifies the signal peptide (SP) or transmembrane (TM) domain of the protein. Table 4 shows the region of each cDNA encompassed by the clone present on a microarray and identified as differentially expressed. Columns 1 and 2 show the SEQ ID NO and TEMPLATE ID, respectively. Column 3 shows the CLONE ID and columns 4 and 5 show the first nucleotide (START) and last nucleotide (STOP) encompassed by the clone on the template.

[0038] The differential expression of the cDNAs as shown using microarray analysis define an expression profile for prostate cancer. Experimentally, differential expression of the cDNAs can be evaluated by methods including, but not limited to, differential display by spatial immobilization or by gel electrophoresis, genome mismatch scanning, representational discriminant analysis, clustering, transcript imaging and array technologies. These methods may be used alone or in combination.

[0039] The combination may be arranged on a substrate and hybridized with tissues from prostate cancer patients to identify which of the cDNAs are differentially expressed. If the patient has a known stage of prostate cancer, i.e., metastasis to brain, bone, or lung, this allows identification of those sequences of highest potential therapeutic value. In one embodiment, an additional set of cDNAs, such as cDNAs encoding signaling molecules, are arranged on the substrate with the combination. Such combinations may be useful in the elucidation of pathways which are affected in prostate cancer or to identify new, coexpressed, candidate, therapeutic molecules.

[0040] In another embodiment, the combination can be used for large scale genetic or gene expression analysis of a large number of novel, nucleic acid molecules. These samples are prepared by methods well known in the art and are from mammalian cells or tissues which are in a certain stage of development; have been treated with a known molecule or compound, such as a cytokine, growth factor, a drug, and the like; or have been extracted or biopsied from a mammal with a known or unknown condition, disorder, or disease before or after treatment. The sample nucleic acid molecules are hybridized to the combination for the purpose of defining a novel gene profile associated with that developmental stage, treatment, or disorder.

[0041] cDNAs and Their Use

[0042] cDNAs can be prepared by a variety of synthetic or enzymatic methods well known in the art. cDNAs can be synthesized, in whole or in part, using chemical methods well known in the art (Caruthers et al. (1980) Nucleic Acids Symp Ser (7) 215-233). Alternatively, cDNAs can be produced enzymatically or recombinantly, by in vitro or in vivo transcription.

[0043] Nucleotide analogs can be incorporated into cDNAs by methods well known in the art. The only requirement is that the incorporated analog must base pair with native purines or pyrimidines. For example, 2,6-diaminopurine can substitute for adenine and form stronger bonds with thymidine than those between adenine and thymidine. A weaker pair is formed when hypoxanthine is substituted for guanine and base pairs with cytosine. Additionally, cDNAs can include nucleotides that have been derivatized chemically or enzymatically. cDNAs can be synthesized on a substrate. Synthesis on the surface of a substrate may be accomplished using a chemical coupling procedure and a piezoelectric printing apparatus as described by Baldeschweiler et al. (PCT publication WO95/25 1116). Alternatively, the cDNAs can be synthesized on a substrate surface using a self-addressable electronic device that controls when reagents are added as described by Heller et al. (U.S. Pat. No. 5,605,662). cDNAs can be synthesized directly on a substrate by sequentially dispensing reagents for their synthesis on the substrate surface or by dispensing preformed DNA fragments to the substrate surface. Typical dispensers include a micropipette delivering solution to the substrate with a robotic system to control the position of the micropipette with respect to the substrate. There can be a multiplicity of dispensers so that reagents can be delivered to the reaction regions efficiently.

[0044] cDNAs can be immobilized on a substrate by covalent means such as by chemical bonding procedures or UV irradiation. In one method, a cDNA is bound to a glass surface which has been modified to contain epoxide or aldehyde groups. In another method, a cDNA is placed on a polylysine coated surface and UV cross-linked to it as described by Shalon et al. (WO95/35505). In yet another method, a cDNA is actively transported from a solution to a given position on a substrate by electrical means (Heller, supra). cDNAs do not have to be directly bound to the substrate, but rather can be bound to the substrate through a linker group. The linker groups are typically about 6 to 50 atoms long to provide exposure of the attached cDNA. Preferred linker groups include ethylene glycol oligomers, diamines, diacids and the like. Reactive groups on the substrate surface react with a terminal group of the linker to bind the linker to the substrate. The other terminus of the linker is then bound to the cDNA. Alternatively, polynucleotides, plasmids or cells can be arranged on a filter. In the latter case, cells are lysed, proteins and cellular components degraded, and the DNA is coupled to the filter by UV cross-linking.

[0045] The cDNAs may be used for a variety of purposes. For example, the combination of the invention may be used on an array. The array, in turn, can be used in high-throughput methods for detecting a related polynucleotide in a sample, screening a plurality of molecules or compounds to identify a ligand, diagnosing prostate cancer, or inhibiting or inactivating a therapeutically relevant gene related to the cDNA.

[0046] When the cDNAs of the invention are employed on an array, the cDNAs are arranged so that each cDNA is present at a specified location on the substrate. Because the cDNAs are at specified locations, the hybridization patterns and intensities, which together create a unique expression profile, can be interpreted in terms of expression levels of particular genes and can be correlated with a particular metabolic process, condition, disorder, disease, stage of disease, or treatment.

[0047] Hybridization

[0048] The cDNAs or fragments or complements thereof may be used in various hybridization technologies. The cDNAs may be labeled using a variety of reporter molecules by either PCR, recombinant, or enzymatic techniques. For example, a commercially available vector containing the cDNA is transcribed in the presence of an appropriate polymerase, such as 17 or SP6 polymerase, and at least one labeled nucleotide. Commercial kits are available for labeling and cleanup of such cDNAs. Radioactive (Amersham Biosciences (APB), Piscataway N.J.), fluorescent (Qiagen-Operon, Alameda Calif.), and chemiluminescent labeling (Promega, Madison Wis.) are well known in the art.

[0049] A cDNA may represent the complete coding region of an mRNA or be designed or derived from unique regions of the mRNA or genomic molecule, an intron, a 3′ untranslated region, or from a conserved motif. The cDNA is at least 18 contiguous nucleotides in length and is usually single stranded. Such a cDNA may be used under hybridization conditions that allow binding only to an identical sequence, a naturally occurring molecule encoding the same protein, or an allelic variant. Discovery of related human and mammalian sequences may also be accomplished using a pool of degenerate cDNAs and appropriate hybridization conditions. Generally, a cDNA for use in Southern or northern hybridizations may be from about 400 to about 6000 nucleotides long. Such cDNAs have high binding specificity in solution-based or substrate-based hybridizations. An oligonucleotide may be used to detect or quantify expression of a polynucleotide in a sample using PCR.

[0050] The stringency of hybridization is determined by G+C content of the cDNA, salt concentration, and temperature. In particular, stringency is increased by reducing the concentration of salt or raising the hybridization temperature. In solutions used for some membrane based hybridizations, addition of an organic solvent such as formamide allows the reaction to occur at a lower temperature. Hybridization may be performed with buffers, such as 5×saline sodium citrate (SSC) with 1% sodium dodecyl sulfate (SDS) at 60° C., that permit the formation of a hybridization complex between nucleic acid sequences that contain some mismatches. Subsequent washes are performed with buffers such as 0.2×SSC with 0.1% SDS at either 45° C. (medium stringency) or 65⁰-68° C. (high stringency). At high stringency, hybridization complexes will remain stable only where the nucleic acids are completely complementary. In some membrane-based hybridizations, preferably 35% or most preferably 50%, formamide may be added to the hybridization solution to reduce the temperature at which hybridization is performed. Background signals may be reduced by the use of detergents such as Sarkosyl or TRITON X-100 (Sigma-Aldrich, St. Louis Mo.) and a blocking agent such as denatured salmon sperm DNA. Selection of components and conditions for hybridization are well known to those skilled in the art and are reviewed in Ausubel et al. (1997, Short Protocols in Molecular Biology, John Wiley & Sons, New York N.Y., Units 2.8-2.11, 3.18-3.19 and 4-6-4.9).

[0051] Dot-blot, slot-blot, low density and high density arrays are prepared and analyzed using methods known in the art. cDNAs from about 18 consecutive nucleotides to about 5000 consecutive nucleotides in length are contemplated by the invention and used in array technologies. Depending on the technology employed, the number of cDNAs on a substrate ranges from at least two to about 100,000. The high density array may be used to monitor the expression level of large numbers of genes simultaneously and to identify genetic variants, mutations, and SNPs. Such information may be used to determine gene function; to understand the genetic basis of a disorder; to diagnose a disorder; and to develop and monitor the activities of therapeutic agents being used to control or cure a disorder. (See, e.g., U.S. Pat. No. 5,474,796; WO95/11995; WO95/35505; U.S. Pat. No. 5,605,662; and U.S. Pat. No. 5,958,342.)

[0052] Screening and Purification Assays

[0053] A cDNA may be used to screen a library or a plurality of molecules or compounds for a ligand which specifically binds the cDNA. Ligands may be DNA molecules, RNA molecules, peptide nucleic acid molecules, peptides, proteins such as transcription factors, promoters, enhancers, repressors, and other proteins that regulate replication, transcription, or translation of the polynucleotide in the biological system. The assay involves combining the cDNA or a fragment thereof with the molecules or compounds under conditions that allow specific binding and detecting the bound cDNA to identify at least one ligand that specifically binds the cDNA.

[0054] In one embodiment, the cDNA may be incubated with a library of isolated and purified molecules or compounds and binding activity determined by methods such as a gel-retardation assay (U.S. Pat. No. 6,010,849) or a reticulocyte lysate transcriptional assay. In another embodiment, the cDNA may be incubated with nuclear extracts from biopsied and/or cultured cells and tissues. Specific binding between the cDNA and a molecule or compound in the nuclear extract is initially determined by gel shift assay. Protein binding may be confirmed by raising antibodies against the protein and adding the antibodies to the gel-retardation assay where specific binding will cause a supershift in the assay.

[0055] In another embodiment, the cDNA may be used to purify a ligand, molecule or compound using affinity chromatography methods well known in the art. In one embodiment, the cDNA is chemically reacted with cyanogen bromide groups on a polymeric resin or gel. Then a sample is passed over and reacts with or binds to the cDNA. The molecule or compound which is bound to the cDNA may be released from the cDNA by increasing the salt concentration of the flow-through medium and collected.

[0056] Protein Production and Uses

[0057] The full length cDNAs or fragment thereof may be used to produce purified proteins using recombinant DNA technologies described herein and taught in Ausubel (sura; Units 16.1-16.62). One of the advantages of producing proteins by these procedures is the ability to obtain highly-enriched sources of the proteins thereby simplifying purification procedures.

[0058] The proteins may contain amino acid substitutions, deletions or insertions made on the basis of similarity in polarity, charge, solubility, hydrophobicity, and/or the amphipathic nature of the residues involved. Such substitutions may be conservative in nature when the substituted residue has structural or chemical properties similar to the original residue (e.g., replacement of leucine with isoleucine or valine) or they may be nonconservative when the replacement residue is radically different (e.g., a glycine replaced by a tryptophan). Computer programs included in LASERGENE software (DNASTAR, Madison Wis.) and algorithms included in RasMol software (University of Massachusetts, Amherst Mass.) may be used to help determine which and how many amino acid residues in a particular portion of the protein may be substituted, inserted, or deleted without abolishing biological or immunological activity.

[0059] Expression of Encoded Proteins

[0060] Expression of a particular cDNA may be accomplished by cloning the cDNA into a vector and transforming this vector into a host cell. The cloning vector used for the construction of cDNA libraries in the LIFESEQ databases (Incyte Genomics, Palo Alto Calif.) may also be used for expression. Such vectors usually contain a promoter and a polylinker useful for cloning, priming, and transcription. An exemplary vector may also contain the promoter for β-galactosidase, an amino-terminal methionine and the subsequent seven amino acid residues of β-galactosidase. The vector may be transformed into competent E. coli cells. Induction of the isolated bacterial strain with isopropylthiogalactoside using standard methods will produce a fusion protein that contains an N terminal methionine, the first seven residues of β-galactosidase, about 15 residues of linker, and the protein encoded by the cDNA.

[0061] The cDNA may be shuttled into other vectors known to be useful for expression of protein in specific hosts. Oligonucleotides containing cloning sites and fragments of DNA sufficient to hybridize to stretches at both ends of the cDNA may be chemically synthesized by standard methods. These primers may then be used to amplify the desired fragments by PCR. The fragments may be digested with appropriate restriction enzymes under standard conditions and isolated using gel electrophoresis. Alternatively, similar fragments are produced by digestion of the cDNA with appropriate restriction enzymes and filled in with chemically synthesized oligonucleotides. Fragments of the coding sequence from more than one gene may be ligated together and expressed.

[0062] Signal sequences that dictate secretion of soluble proteins are particularly desirable as component parts of a recombinant sequence. For example, a chimeric protein may be expressed that includes one or more additional purification-facilitating domains. Such domains include, but are not limited to, metal-chelating domains that allow purification on immobilized metals, protein A domains that allow purification on immobilized immunoglobulin, and the domain utilized in the FLAGS extension/affinity purification system (Immunex, Seattle Wash.). The inclusion of a cleavable-linker sequence such as ENTEROKINASEMAX (Invitrogen, San Diego Calif.) between the protein and the purification domain may also be used to recover the protein.

[0063] Suitable host cells may include, but are not limited to, mammalian cells such as Chinese Hamster Ovary (CHO) and human 293 cells, insect cells such as Sf9 cells, plant cells such as Nicotiana tabacum, yeast cells such as Saccharomyces cerevisiae, and bacteria such as E. coli. For each of these cell systems, a useful vector may also include an origin of replication and one or two selectable markers to allow selection in bacteria as well as in a transformed eukaryotic host. Vectors for use in eukaryotic host cells may require the addition of 3′ poly(A) tail if the cDNA lacks poly(A).

[0064] Additionally, the vector may contain promoters or enhancers that increase gene expression. Many promoters are known and used in the art. Most promoters are host specific and exemplary promoters includes SV40 promoters for CHO cells; T7 promoters for bacterial hosts; viral promoters and enhancers for plant cells; and PGH promoters for yeast. Adenoviral vectors with the rous sarcoma virus enhancer or retroviral vectors with long terminal repeat promoters may be used to drive protein expression in mammalian cell lines. Once homogeneous cultures of recombinant cells are obtained, large quantities of secreted soluble protein may be recovered from the conditioned medium and analyzed using chromatographic methods well known in the art. An alternative method for the production of large amounts of secreted protein involves the transformation of mammalian embryos and the recovery of the recombinant protein from milk produced by transgenic cows, goats, sheep, and the like.

[0065] In addition to recombinant production, proteins or portions thereof may be produced manually, using solid-phase techniques (Stewart et al. (1969) Solid-Phase Peptide Synthesis, W H Freeman, San Francisco Calif.; Merrifield (1963) J Am Chem Soc 5:2149-2154), or using machines such as the 431A peptide synthesizer (Applied Biosystems (ABI), Foster City Calif.). Proteins produced by any of the above methods may be used as pharmaceutical compositions to treat disorders associated with null or inadequate expression of the genomic sequence.

[0066] Screening and Purification Assays

[0067] A protein or a portion thereof produced using a cDNA of the invention may be used to screen a library or a plurality of molecules or compounds for a ligand with specific binding affinity or to purify a molecule or compound from a sample. The protein or portion thereof employed in such screening may be free in solution, affixed to an abiotic or biotic substrate, or located intracellularly. For example, viable or fixed prokaryotic host cells that are stably transformed with recombinant nucleic acids that have expressed and positioned a protein on their cell surface can be used in screening assays. The cells are screened against a library or a plurality of ligands and the specificity of binding or formation of complexes between the expressed protein and the ligand may be measured. The ligands may be agonists, antagonists, antibodies, DNA molecules, enhancers, small drug molecules, immunoglobulins, inhibitors, mimetics, peptide nucleic acid molecules, peptides, pharmaceutical agents, proteins, and regulatory proteins, repressors, RNA molecules, ribozymes, and transcription factors or any other test molecule or compound that specifically binds the protein. An exemplary assay involves combining the mammalian protein or a portion thereof with the molecules or compounds under conditions that allow specific binding and detecting the bound protein to identify at least one ligand that specifically binds the protein.

[0068] This invention also contemplates the use of competitive drug screening assays in which neutralizing antibodies capable of binding the protein specifically compete with a test compound capable of binding to the protein or oligopeptide or fragment thereof. One method for high throughput screening using very small assay volumes and very small amounts of test compound is described in U.S. Pat. No. 5,876,946. Molecules or compounds identified by screening may be used in a model system to evaluate their toxicity, diagnostic, or therapeutic potential.

[0069] The protein may be used to purify a ligand from a sample. A method for using a protein to purify a ligand would involve combining the protein or a portion thereof with a sample under conditions to allow specific binding, recovering the bound protein, and using an appropriate chaotropic agent to separate the protein from the purified ligand.

[0070] Production of Antibodies

[0071] A protein encoded by a cDNA of the invention may be used to produce specific antibodies. Antibodies may be produced using an oligopeptide or a portion of the protein with inherent immunological activity. Methods for producing antibodies include: 1) injecting an animal, usually goats, rabbits, or mice, with the protein, or an antigenically-effective portion or an oligopeptide thereof, to induce an immune response; 2) engineering hybridomas to produce monoclonal antibodies; 3) inducing in vivo production in the lymphocyte population; or 4) screening libraries of recombinant immunoglobulins. Recombinant immunoglobulins may be produced as taught in U.S. Pat. No. 4,816,567.

[0072] Antibodies produced using the proteins of the invention are useful for the diagnosis of prepathologic disorders as well as the diagnosis of chronic or acute diseases characterized by abnormalities in the expression, amount, or distribution of the protein. A variety of protocols for competitive binding or immunoradiometric assays using either polyclonal or monoclonal antibodies specific for proteins are well known in the art. Immunoassays typically involve the formation of complexes between a protein and its specific binding molecule or compound and the measurement of complex formation. Immunoassays may employ a two-site, monoclonal-based assay that utilizes monoclonal antibodies reactive to two noninterfering epitopes on a specific protein or a competitive binding assay (Pound (1998) Immunochemical Protocols, Humana Press, Totowa N.J.).

[0073] Immunoassay procedures may be used to quantify expression of the protein in cell cultures, in subjects with a particular disorder or in model animal systems under various conditions. Increased or decreased production of proteins as monitored by immunoassay may contribute to knowledge of the cellular activities associated with developmental pathways, engineered conditions or diseases, or treatment efficacy. The quantity of a given protein in a given tissue may be determined by performing immunoassays on freeze-thawed detergent extracts of biological samples and comparing the slope of the binding curves to binding curves generated by purified protein.

[0074] Labeling of Molecules for Assay

[0075] A wide variety of reporter molecules and conjugation techniques are known by those skilled in the art and may be used in various cDNA, polynucleotide, protein, peptide or antibody assays. Synthesis of labeled molecules may be achieved using commercial kits for incorporation of a labeled nucleotide such as ³²P-dCTP, Cy3-dCTP or Cy5-dCTP or amino acid such as ³⁵S-methionine. Polynucleotides, cDNAs, proteins, or antibodies may be directly labeled with a reporter molecule by chemical conjugation to amines, thiols and other groups present in the molecules using reagents such as BIODIPY or FITC (Molecular Probes, Eugene Oreg.).

[0076] The proteins and antibodies may be labeled for purposes of assay by joining them, either covalently or noncovalently, with a reporter molecule that provides for a detectable signal. A wide variety of labels and conjugation techniques are known and have been reported in the scientific and patent literature including, but not limited to U.S. Pat. Nos. 3,817,837; 3,850,752; 3,939,350; 3,996,345; 4,277,437; 4,275,149; and 4,366,241.

[0077] Diagnostics

[0078] The cDNAs, or fragments thereof, may be used to detect and quantify differential gene expression; absence, presence, or excess expression of mRNAs; or to monitor mRNA levels during therapeutic intervention of prostate cancer. These cDNAs can also be utilized as markers of treatment efficacy against prostate cancer over a period ranging from several days to months. The diagnostic assay may use hybridization or amplification technology to compare gene expression in a biological sample from a patient to standard samples in order to detect differential expression. Qualitative or quantitative methods for this comparison are well known in the art.

[0079] For example, the cDNA may be labeled by standard methods and added to a biological sample from a patient under conditions for hybridization complex formation. After an incubation period, the sample is washed and the amount of label (or signal) associated with hybridization complexes is quantified and compared with a standard value. If the amount of label in the patient sample is significantly altered in comparison to the standard value, then the presence of the associated condition, disease or disorder is indicated.

[0080] In order to provide a basis for the diagnosis of a disorder associated with prostate cancer, a normal or standard expression profile is established. This may be accomplished by combining a biological sample taken from normal subjects, either animal or human, with a probe under conditions for hybridization or amplification. Standard hybridization may be quantified by comparing the values obtained using normal subjects with values from an experiment in which a known amount of a purified target sequence is used. Standard values obtained in this manner may be compared with values obtained from samples from patients who are symptomatic for a particular condition, disease, or disorder. Deviation from standard values toward those associated with a particular condition is used to diagnose that condition.

[0081] Such assays may also be used to evaluate the efficacy of a particular therapeutic treatment regimen in animal studies and in clinical trial or to monitor the treatment of an individual patient. Once the presence of a condition is established and a treatment protocol is initiated, diagnostic assays may be repeated on a regular basis to determine if the level of expression in the patient begins to approximate that which is observed in a normal subject. The results obtained from successive assays may be used to show the efficacy of treatment over a period ranging from several days to months.

[0082] Gene Expression Profiles

[0083] A gene expression profile comprises a plurality of proteins or cDNAs and a plurality of detectable complexes, wherein each complex is formed by specific binding between the protein or cDNA and a ligand in a in a sample. The cDNAs of the invention are used as elements on an array to analyze gene expression profiles. In one embodiment, the array is used to monitor the progression of disease. Researchers can assess and catalog the differences in gene expression between healthy and diseased tissues or cells. By analyzing changes in patterns of gene expression, disease can be diagnosed at earlier stages before the patient is symptomatic. The invention can be used to formulate a prognosis and to design a treatment regimen. The invention can also be used to monitor the efficacy of treatment. For treatments with known side effects, the array is employed to improve the treatment regimen. A dosage is established that causes a change in genetic expression patterns indicative of successful treatment. Expression patterns associated with the onset of undesirable side effects are avoided. This approach may be more sensitive and rapid than waiting for the patient to show inadequate improvement, or to manifest side effects, before altering the course of treatment.

[0084] Two-dimensional polyacrylamide gel electrophoresis, mass spectrophotometry, western analysis, ELISA, RIA, fluorescent activated cell sorting (FACS), and protein or antibody arrays are used to produce protein expression profiles. Protocols for detecting and measuring protein expression using labeling moieties appropriate to the protocol are well known in the art.

[0085] Experimentally, expression profiles can also be evaluated by methods including, but not limited to, differential display by spatial immobilization or by gel electrophoresis, genome mismatch scanning, representational discriminant analysis, clustering, transcript imaging, and by protein or antibody arrays. Expression profiles produced by these methods may be used alone or in combination. The correspondence between mRNA and protein expression has been discussed by Zweiger (2001, Transducing the Genome. McGraw-Hill, San Francisco, Calif.) and Glavas et al. (2001; T cell activation upregulates cyclic nucleotide phosphodiesterases 8A1 and 7A3, Proc Natl Acad Sci 98:6319-6342) among others.

[0086] In another embodiment, animal models which mimic a human disease can be used to characterize expression profiles associated with a particular condition, disorder or disease; or treatment of the condition, disorder or disease. Novel treatment regimens may be tested in these animal models using arrays to establish and then follow expression profiles over time. In addition, arrays may be used with cell cultures or tissues removed from animal models to rapidly screen large numbers of candidate drug molecules, looking for ones that produce an expression profile similar to those of known therapeutic drugs, with the expectation that molecules with the same expression profile will likely have similar therapeutic effects. Thus, the invention provides the means to rapidly determine the molecular mode of action of a drug.

[0087] Assays Using Antibodies

[0088] Antibodies directed against epitopes on a protein encoded by a cDNA of the invention may be used in assays to quantify the amount of protein found in a particular human cell. Such assays include methods utilizing the antibody and a label to detect expression level under normal or disease conditions. The antibodies may be used with or without modification, and labeled by joining them, either covalently or noncovalently, with a labeling moiety. Various immunoassays for proteins (also mentioned above) typically involve the formation of complexes between the protein and its specific antibody and the measurement of such complexes.

[0089] Antibody Arrays

[0090] In an alternative to yeast two hybrid system analysis of proteins, an antibody array can be used to study protein-protein interactions and phosphorylation. A variety of protein ligands are immobilized on a membrane using methods well known in the art. The array is incubated in the presence of cell lysate until protein:antibody complexes are formed. Proteins of interest are identified by exposing the membrane to an antibody specific to the protein of interest. In the alternative, a protein of interest is labeled with digoxigenin (DIG) and exposed to the membrane; then the membrane is exposed to anti-DIG antibody which reveals where the protein of interest forms a complex. The identity of the proteins with which the protein of interest interacts is determined by the position of the protein of interest on the membrane.

[0091] Antibody arrays can also be used for high-throughput screening of recombinant antibodies. Bacteria containing antibody genes are robotically-picked and gridded at high density (up to 18,342 different double-spotted clones) on a filter. Up to 15 antigens at a time are used to screen for clones to identify those that express binding antibody fragments. These antibody arrays can also be used to identify proteins which are differentially expressed in samples (de Wildt et al. (2000) Nature Biotechnol 18:989-94).

[0092] Therapeutics

[0093] The cDNAs can be used in gene therapy. cDNAs can be delivered ex vivo to target cells, such as cells of bone marrow. Once stable integration and transcription and or translation are confirmed, the bone marrow may be reintroduced into the subject. Expression of the protein encoded by the cDNA may correct a disorder associated with mutation of a normal sequence, reduction or loss of an endogenous protein, or overepression of an endogenous or mutant protein. Alternatively, cDNAs may be delivered in vivo using vectors such as retrovirus, adenovirus, adeno-associated virus, herpes simplex virus, and bacterial plasmids. Non-viral methods of gene delivery include cationic liposomes, polylysine conjugates, artificial viral envelopes, and direct injection of DNA (Anderson (1998) Nature 392:25-30; Dachs et al. (1997) Oncol Res 9:313-325; Chu et al. (1998) J Mol Med 76(3-4):184-192; Weiss et al. (1999) Cell Mol Life Sci 55(3):334-358; Agrawal (1996) Antisense Therapeutics, Humana Press, Totowa N.J.; and August et al. (1997) Gene Therapy (Advances in Pharmacology, Vol. 40), Academic Press, San Diego Calif.).

[0094] In addition, expression of a particular protein can be regulated through the specific binding of a fragment of a cDNA to a genomic sequence or an mRNA which encodes the protein or directs its transcription or translation. The cDNA can be modified or derivatized to any RNA-like or DNA-like material including peptide nucleic acids, branched nucleic acids, and the like. These sequences can be produced biologically by transforming an appropriate host cell with a vector containing the sequence of interest.

[0095] Molecules which regulate the activity of the cDNA or encoded protein are useful as therapeutics for treating prostate cancer. Such molecules include agonists which increase the expression or activity of the polynucleotide or encoded protein, respectively; or antagonists which decrease expression or activity of the polynucleotide or encoded protein, respectively. In one aspect, an antibody which specifically binds the protein may be used directly as an antagonist or indirectly as a delivery mechanism for bringing a pharmaceutical agent to cells or tissues which express the protein.

[0096] Additionally, any of the proteins, or their ligands, or complementary nucleic acid sequences may be administered as pharmaceutical compositions or in combination with other appropriate therapeutic agents. Selection of the appropriate agents for use in combination therapy may be made by one of ordinary skill in the art, according to conventional pharmaceutical principles. The combination of therapeutic agents may act synergistically to affect the treatment or prevention of the conditions and disorders associated with an immune response. Using this approach, one may be able to achieve therapeutic efficacy with lower dosages of each agent, thus reducing the potential for adverse side effects. Further, the therapeutic agents may be combined with pharmaceutically-acceptable carriers including excipients and auxiliaries which facilitate processing of the active compounds into preparations which can be used pharmaceutically. Further details on techniques for formulation and administration used by doctors and pharmacists may be found in the latest edition of Remington's Pharmaceutical Sciences (Mack Publishing, Easton Pa.).

[0097] Model Systems

[0098] Animal models may be used as bioassays where they exhibit a phenotypic response similar to that of humans and where exposure conditions are relevant to human exposures. Mammals are the most common models, and most infectious agent, cancer, drug, and toxicity studies are performed on rodents such as rats or mice because of low cost, availability, lifespan, reproductive potential, and abundant reference literature. Inbred and outbred rodent strains provide a convenient model for investigation of the physiological consequences of underexpression or overexpression of genes of interest and for the development of methods for diagnosis and treatment of diseases. A mammal inbred to overexpress a particular gene (for example, secreted in milk) may also serve as a convenient source of the protein expressed by that gene.

[0099] Transgenic Animal Models

[0100] Transgenic rodents that overexpress or underexpress a gene of interest may be inbred and used to model human diseases or to test therapeutic or toxic agents. (See, e.g., U.S. Pat. No. 5,175,383 and U.S. Pat. No. 5,767,337.) In some cases, the introduced gene may be activated at a specific time in a specific tissue type during fetal or postnatal development. Expression of the transgene is monitored by analysis of phenotype, of tissue-specific mRNA expression, or of serum and tissue protein levels in transgenic animals before, during, and after challenge with experimental drug therapies.

[0101] Embryonic Stem Cells

[0102] Embryonic (ES) stem cells isolated from rodent embryos retain the potential to form embryonic tissues. When ES cells such as the mouse 129/SvJ cell line are placed in a blastocyst from the C57BLJ6 mouse strain, they resume normal development and contribute to tissues of the live-born animal. ES cells are preferred for use in the creation of experimental knockout and knockin animals. The method for this process is well known in the art and the steps are: the cDNA is introduced into a vector, the vector is transformed into ES cells, transformed cells are identified and microinjected into mouse cell blastocysts, blastocysts are surgically transferred to pseudopregnant dams. The resulting chimeric progeny are genotyped and bred to produce heterozygous or homozygous strains.

[0103] Knockout Analysis

[0104] In gene knockout analysis, a region of a gene is enzymatically modified to include a non-natural intervening sequence such as the neomycin phosphotransferase gene (neo; Capecchi (1989) Science 244:1288-1292). The modified gene is transformed into cultured ES cells and integrates into the endogenous genome by homologous recombination. The inserted sequence disrupts transcription and translation of the endogenous gene.

[0105] Knockin Analysis

[0106] ES cells can be used to create knockin humanized animals or transgenic animal models of human diseases. With knockin technology, a region of a human gene is injected into animal ES cells, and the human sequence integrates into the animal cell genome. Transgenic progeny or inbred lines are studied and treated with potential pharmaceutical agents to obtain information on the progression and treatment of the analogous human condition.

[0107] As described herein, the uses of the cDNAs, provided in the Sequence Listing of this application, and their encoded proteins are exemplary of known techniques and are not intended to reflect any limitation on their use in any technique that would be known to the person of average skill in the art. Furthermore, the cDNAs provided in this application may be used in molecular biology techniques that have not yet been developed, provided the new techniques rely on properties of nucleotide sequences that are currently known to the person of ordinary skill in the art, e.g., the triplet genetic code, specific base pair interactions, and the like. Likewise, reference to a method may include combining more than one method for obtaining or assembling full length cDNA sequences that will be known to those skilled in the art. It is also to be understood that this invention is not limited to the particular methodology, protocols, and reagents described, as these may vary. It is also understood that the terminology used herein is for the purpose of describing particular embodiments only, and is not intended to limit the scope of the present invention which will be limited only by the appended claims. The examples below are provided to illustrate the subject invention and are not included for the purpose of limiting the invention.

### EXAMPLES

[0108] I Construction of cDNA Libraries

[0109] RNA was purchased from Clontech Laboratories (Palo Alto Calif.) or isolated from various tissues. Some tissues were homogenized and lysed in guanidinium isothiocyanate, while others were homogenized and lysed in phenol or in a suitable mixture of denaturants, such as TRIZOL reagent (Invitrogen). The resulting lysates were centrifuged over CsCl cushions or extracted with chloroform. RNA was precipitated with either isopropanol or ethanol and sodium acetate, or by other routine methods.

[0110] Phenol extraction and precipitation of RNA were repeated as necessary to increase RNA purity. In most cases, RNA was treated with DNAse. For most libraries, poly(A) RNA was isolated using oligo d(T)-coupled paramagnetic particles (Promega), OLIGOTEX latex particles (Qiagen, Valencia Calif.), or an OLIGOTEX mRNA purification kit (Qiagen). Alternatively, poly(A) RNA was isolated directly from tissue lysates using other kits, including the POLY(A)PURE mRNA purification kit (Ambion, Austin Tex.).

[0111] In some cases, Stratagene (La Jolla Calif.) was provided with RNA and constructed the corresponding cDNA libraries. Otherwise, cDNA was synthesized and cDNA libraries were constructed with the UNIZAP vector system (Stratagene) or SUPERSCRIPT plasmid system (Invitrogen) using the recommended procedures or similar methods known in the art. (See Ausubel, supra, Units 5.1 through 6.6.) Reverse transcription was initiated using oligo d(T) or random primers. Synthetic oligonucleotide adapters were ligated to double stranded cDNA, and the cDNA was digested with the appropriate restriction enzyme or enzymes. For most libraries, the cDNA was size-selected (300-1000 bp) using SEPHACRYL S1000, SEPHAROSE CL2B, or SEPHAROSE CL4B column chromatography (APB) or preparative agarose gel electrophoresis. cDNAs were ligated into compatible restriction enzyme sites of the polylinker of the pBLUESCRIPT plasmid (Stratagene), pSPORT1 plasmid (Invitrogen), or pINCY plasmid (Incyte Genomics). Recombinant plasmids were transformed into XL1-BLUE, XL1-BLUEMRF, or SOLR competent E. coli cells (Stratagene) or DH5a, DH10B, or ELECTROMAX DH10B competent E. coli cells (Invitrogen).

[0112] In some cases, libraries were superinfected with a 5×excess of the helper phage, M13K07, according to the method of Vieira et al. (1987, Methods Enzymol 153:3-11) and normalized or subtracted using a methodology adapted from Soares (1994, Proc Natl Acad Sci 91:9228-9232), Swaroop et al. (1991, Nucl Acids Res 19:1954), and Bonaldo et al. (1996, Genome Research 6:791-806). The modified Soares normalization procedure was utilized to reduce the repetitive cloning of highly expressed high abundance cDNAs while maintaining the overall sequence complexity of the library. Modification included significantly longer hybridization times which allowed for increased gene discovery rates by biasing the normalized libraries toward those infrequently expressed low-abundance cDNAs which are poorly represented in a standard transcript image (Soares supra).

[0113] II Isolation and Sequencing of cDNA Clones

[0114] Plasmids were recovered from host cells by in vivo excision using the UNIZAP vector system (Stratagene) or by cell lysis. Plasmids were purified using one of the following: the Magic or WIZARD MINIPREPS DNA purification system (Promega); the AGTC MINIPREP purification kit (Edge BioSystems, Gaithersburg Md.); the QIAWELL 8, QIAWELL 8 Plus, or QIAWELL 8 Ultra plasmid purification systems, or the REAL PREP 96 plasmid purification kit (Qiagen). Following precipitation, plasmids were resuspended in 0.1 ml of distilled water and stored, with or without lyophilization, at 4° C.

[0115] Alternatively, plasmid DNA was amplified from host cell lysates using direct link PCR in a high-throughput format (Rao (1994) Anal Biochem 216:1-14). Host cell lysis and thermal cycling steps were carried out in a single reaction mixture. Samples were processed and stored in 384-well plates, and the concentration of amplified plasmid DNA was quantified fluorometrically using PICOGREEN dye (Molecular Probes) and a FLUOROSKAN II fluorescence scanner (Labsystems Oy, Helsinki, Finland). cDNA sequencing reactions were processed using standard methods or high-throughput instrumentation such as the CATALYST 800 thermal cycler (ABI) or the DNA ENGINE thermal cycler (MJ Research, Watertown Mass.) in conjunction with the HYDRA microdispenser (Robbins Scientific, Sunnyvale Calif.) or the MICROLAB 2200 system (Hamilton, Reno Nev.). cDNA sequencing reactions were prepared using reagents provided by APB or supplied in ABI sequencing kits such as the PRISM BIGDYE cycle sequencing kit (ABI). Electrophoretic separation of cDNA sequencing reactions and detection of labeled cDNAs were carried out using the MEGABACE 1000 DNA sequencing system (APB); the PRISM 373 or 377 sequencing systems (ABI) in conjunction with standard ABI protocols and base calling software; or other sequence analysis systems known in the art. Reading frames within the cDNA sequences were identified using standard methods (reviewed in Ausubel, supra, Unit 7.7).

[0116] III Extension of cDNA Sequences

[0117] Nucleic acid sequences were extended using the cDNA clones and oligonucleotide primers. One primer was synthesized to initiate 5′ extension of the known fragment, and the other, to initiate 3′ extension of the known fragment. The initial primers were designed using OLIGO software (Molecular Insights, Cascade Colo.), or another appropriate program, to be about 22 to 30 nucleotides in length, to have a GC content of about 50% or more, and to anneal to the target sequence at temperatures of about 68° C. to about 72° C. Any stretch of nucleotides which would result in hairpin structures and primer-primer dimerizations was avoided.

[0118] Selected human cDNA libraries were used to extend the sequence. If more than one extension was necessary or desired, additional or nested sets of primers were designed. Preferred libraries are ones that have been size-selected to include larger cDNAs. Also, random primed libraries are preferred because they will contain more sequences with the 5′ and upstream regions of genes. A randomly primed library is particularly useful if an oligo d(T) library does not yield a full-length cDNA.

[0119] High fidelity amplification was obtained by PCR using methods well known in the art. PCR was performed in 96-well plates using the DNA ENGINE thermal cycler (MJ Research). The reaction mix contained DNA template, 200 mmol of each primer, reaction buffer containing Mg²⁺, (NH₄)₂SO₄, and β-mercaptoethanol, Taq DNA polymerase (APB), ELONGASE enzyme (Invitrogen), and Pfu DNA polymerase (Stratagene), with the following parameters for primer pair PCI A and PCI B (Incyte Genomics): 1: 94° C., 3 min; 2: 94° C., 15 sec; 3: 60° C., 1 min; 4: 68° C., 2 min; 5: 2, 3, and 4 repeated 20 times; 6: 68° C., 5 min; and 7: storage at 4° C. In the alternative, the parameters for primer pair T7 and SK+(Stratagene) were as follows: 1: 94° C., 3 min; 2: 94° C., 15 sec; 3: 57° C., 1 min; 4: 68° C., 2 min; 5: 2, 3, and 4 repeated 20 times; 6: 68° C., 5 min; and 7: storage at 4° C.

[0120] The concentration of DNA in each well was determined by dispensing 100 μl PICOGREEN reagent (0.25% reagent in 1×TE, v/v; Molecular Probes) and 0.5 μl of undiluted PCR product into each well of an opaque fluorimeter plate (Corning Costar, Acton Mass.) and allowing the DNA to bind to the reagent. The plate was scanned in a FLUOROSKAN II (Labsystems Oy) to measure the fluorescence of the sample and to quantify the concentration of DNA. A 5 μl to 10 μl aliquot of the reaction mixture was analyzed by electrophoresis on a 1% agarose mini-gel to determine which reactions were successful in extending the sequence.

[0121] The extended nucleic acids were desalted and concentrated, transferred to 384-well plates, digested with CviJI cholera virus endonuclease (Molecular Biology Research, Madison Wis.), and sonicated or sheared prior to religation into pUC 18 vector (APB). For shotgun sequencing, the digested nucleic acids were separated on low concentration (0.6 to 0.8%) agarose gels, fragments were excised, and agar digested with AGARACE enzyme (Promega). Extended clones were religated using T4 DNA ligase (New England Biolabs, Beverly Mass.) into pUC18 vector (APB), treated with Pfu DNA polymerase (Stratagene) to fill-in restriction site overhangs, and transformed into competent E. coli cells. Transformed cells were selected on antibiotic-containing media, and individual colonies were picked and cultured overnight at 37° C. in 384-well plates in LB/2×carbenicillin liquid media.

[0122] The cells were lysed, and DNA was amplified by PCR using Taq DNA polymerase (APB) and Pfu DNA polymerase (Stratagene) with the following parameters: 1: 94° C., 3 min; 2: 94° C., 15 sec; 3: 60° C., 1 min; 4: 72° C., 2 min; 5: s 2, 3, and 4 repeated 29 times; 6: 72° C., 5 min; and 7: storage at 4° C. DNA was quantified using PICOGREEN reagent (Molecular Probes) as described above. Samples with low DNA recoveries were reamplified using the same conditions described above. Samples were diluted with 20% dimethylsulfoxide (DMSO; 1:2, v/v), and sequenced using DYENAMIC energy transfer sequencing primers and the DYENAMIC DIRECT cycle sequencing kit (APB) or the PRISM BIGDYE terminator cycle sequencing kit (ABI).

[0123] IV Assembly and Analysis of Sequences

[0124] The nucleic acid sequences presented in the Sequence Listing may contain occasional sequencing errors and unidentified nucleotides (N) that reflect state-of-the-art technology at the time the cDNA was first sequenced. Occasional sequencing errors and Ns may be resolved and SNPs verified either by resequencing the cDNA or using algorithms to compare the alignment of multiple sequences covering the region in which the N or potential SNP occurs. The sequences used in the verification may be identified from any available database using BLAST analysis and aligned using a variety of alignment algorithms described in Ausubel (supra, unit 7.7) and in Meyers (1995; Molecular Biology and Biotechnology, Wiley VCH, New York N.Y., pp. 856-853).

[0125] Component nucleotide sequences from chromatograms were subjected to PHRED analysis (Phil Green, University of Wash., Seattle Wash.) and assigned a quality score. The sequences having at least a required quality score were subject to various pre-processing algorithms to eliminate low quality 3′ ends, vector and linker sequences, polyA tails, Alu repeats, mitochondrial and ribosomal sequences, bacterial contamination sequences, and sequences smaller than 50 base pairs. Sequences were screened using the BLOCK 2 program (Incyte Genomics), a motif analysis program based on sequence information contained in the SWISS-PROT and PROSITE databases (Bairoch et al. (1997) Nucleic Acids Res 25:217-221; Attwood et al. (1997) J Chem Inf Comput Sci 37:417-424).

[0126] Processed sequences were subjected to assembly procedures in which the sequences were assigned to bins, one sequence per bin. Sequences in each bin were assembled to produce consensus sequences, templates. Subsequent new sequences were added to existing bins using BLAST (Altschul (supra); Altschul et al. (supra); Karlin et al. (1988) Proc Natl Acad Sci 85:841-845), BLASTn (vers.1.4, WashU), and CROSSMATCH software (Phil Green, supra). Candidate pairs were identified as all BLAST hits having a quality score greater than or equal to 150. Alignments of at least 82% local identity were accepted into the bin. The component sequences from each bin were assembled using PHRAP (Phil Green, supra). Bins with several overlapping component sequences were assembled using DEEP PHRAP (Phil Green, supra).

[0127] Bins were compared against each other, and those having local similarity of at least 82% were combined and reassembled. Reassembled bins having templates of insufficient overlap (less than 95% local identity) were re-split. Assembled templates were also subjected to analysis by STITCHER/EXON MAPPER algorithms which analyzed the probabilities of the presence of splice variants, alternatively spliced exons, splice junctions, differential expression of alternative spliced genes across tissue types, disease states, and the like. These resulting bins were subjected to several rounds of the above assembly procedures to generate the template sequences found in the LIFESEQ GOLD database (Incyte Genomics).

[0128] The assembled templates were annotated using the following procedure. Template sequences were analyzed using BLASTn (vers. 2.0, NCBI) versus GBpri (GenBank vers. 116). “Hits” were defined as an exact match having from 95% local identity over 200 base pairs through 100% local identity over 100 base pairs, or a homolog match having an E-value equal to or greater than 1×10⁻⁸. (The “E-value” quantifies the statistical probability that a match between two sequences occurred by chance). The hits were subjected to frameshift FASTx versus GENPEPT (GenBank version 109). In this analysis, a homolog match was defined as having an E-value of 1×10⁻⁸. The assembly method used above was described in U.S. Ser. No. 09/276,534, filed Mar. 25, 1999, and the LIFESEQ GOLD user manual (Incyte Genomics).

[0129] Following assembly, template sequences were subjected to motif, BLAST, Hidden Markov Model (HMM; Pearson and Lipman (1988) Proc Natl Acad Sci 85:2444-2448; Smith and Waterman (1981) J Mol Biol 147:195-197), and functional analyses, and categorized in protein hierarchies using methods described in U.S. Ser. No. 08/812,290, filed Mar. 6, 1997; U.S. Ser. No. 08/947,845, filed Oct. 9, 1997; U.S. Pat. No. 5,953,727; and U.S. Ser. No. 09/034,807, filed Mar. 4, 1998. Template sequences may be further queried against public databases such as the GenBank rodent, mammalian, vertebrate, eukaryote, prokaryote, and human EST databases.

[0130] V Selection of Sequences, Microarray Preparation and Use

[0131] Incyte clones represent template sequences derived from the LIESEQ GOLD assembled human sequence database (Incyte Genomics). In cases where more than one clone was available for a particular template, the 5′-most clone in the template was used on the microarray. The HUMAN GENOME GEM series 1-3 microarrays (Incyte Genomics) contain 28,626 array elements which represent 10,068 annotated clusters and 18,558 unannotated clusters.

[0132] For the UNIGEM series microarrays (Incyte Genomics), Incyte clones were mapped to non-redundant Unigene clusters (Unigene database (build 46), NCBI; Shuler (1997) J Mol Med 75:694-698), and the 5′ clone with the strongest BLAST alignment (at least 90% identity and 100 bp overlap) was chosen, verified, and used in the construction of the microarray. The UNIGEM V microarray (Incyte Genomics) contains 7075 array elements which represent 4610 annotated genes and 2,184 unannotated clusters.

[0133] To construct microarrays, cDNAs were amplified from bacterial cells using primers complementary to vector sequences flanking the cDNA insert. Thirty cycles of PCR increased the initial quantity of cDNA from 1-2 ng to a final quantity greater than 5 μg. Amplified cDNAs were then purified using SEPHACRYL-400 columns (APB). Purified cDNAs were immobilized on polymer-coated glass slides. Glass microscope slides (Corning, Corning N.Y.) were cleaned by ultrasound in 0.1% SDS and acetone, with extensive distilled water washes between and after treatments. Glass slides were etched in 4% hydrofluoric acid (VWR Scientific Products, West Chester Pa.), washed extensively in distilled water, and coated with 0.05% aminopropyl silane (Sigma Aldrich, St Louis Mo.) in 95% ethanol. Coated slides were cured in a 110° C. oven. cDNAs were applied to the coated glass substrate using a procedure described in U.S. Pat. No. 5,807,522. One microliter of the cDNA at an average concentration of 100 ng/ul was loaded into the open capillary printing element by a high-speed robotic apparatus which then deposited about 5 nl of cDNA per slide.

[0134] Microarrays were UV-crosslinked using a STRATALINKER UV-crosslinker (Stratagene), and then washed at room temperature once in 0.2% SDS and three times in distilled water. Non-specific binding sites were blocked by incubation of microarrays in 0.2% casein in phosphate buffered saline (Tropix, Bedford Mass.) for 30 minutes at 60° C. followed by washes in 0.2% SDS and distilled water as before.

[0135] Twenty-two UNIGEMV arrays were used to evaluate differential expression across experimental and control samples.

[0136] VI Preparation of Samples

[0137] Cell Growth and Treatments

[0138] The following cell lines were obtained from ATCC (Manassus Va.) and cultured in media according to the manufacturer's protocols: PrEC is a primary prostate epithelial cell line isolated from a normal donor; PC-3 is a prostate adenocarcinoma cell line isolated from a 62 year-old male with grade IV prostate adenocarcinoma metastasized to the bone; DU-145 is a prostate carcinoma cell line isolated from a 69 year-old man with widespread metastatic disease. DU-145 was isolated from a brain metastasis and has no detectable hormone sensitivity; LNCaP is a prostate carcinoma cell line isolated from a lymph node biopsy of a 50 year-old male with metastatic prostate carcinoma. LNCaP cells are responsive to 5-alpha-dihydrotestosterone and express androgen receptors. All cell cultures were incubated in low serum media 48 hours prior to treatment.

[0139] Cells were subjected to the following treatments: R1881 Androgen; PrEC and LNCaP cells were treated with 5 nM R1881 Androgen (Methyltrienolone) for 8, 14, 24, and 38 hrs. EGF; PrEC, LNCap, DU-145, and PC-3 cells were treated with 50 ng/ml of EGF for 4, 8, 14, 24, and 38 hrs. FGF; PrEC, DU-145, and PC-3 cells were treated with 50 ng/ml of FGF for 4, 8, 14, 24, and 38 hrs. TGF-α; PrEC and PC-3 cells were treated with 50 ng/ml of TGF-α for 8, 14, 24, and 36 hrs. TGF-β; PrEC and DU-145 cells were treated with 5 ng/ml of TGF-β for 4, 8, 14, 24, and 38 hrs. Cells were harvested at each time point and prepared as described below.

[0140] Isolation and Labeling of Sample Polynucleotides

[0141] Cells were harvested and lysed in 1 ml of TRIZOL reagent (5×10⁶ cells/ml; Invitrogen). The lysates were vortexed thoroughly and incubated at room temperature for 2-3 minutes and extracted with 0.5 ml chloroform. The extract was mixed, incubated at room temperature for 5 minutes, and centrifuged at 15,000 rpm for 15 minutes at 4° C. The aqueous layer was collected and an equal volume of isopropanol was added. Samples were mixed, incubated at room temperature for 10 minutes, and centrifuged at 15,000 rpm for 20 minutes at 4° C. The supernatant was removed, and the RNA pellet was washed with 1 ml of 70% ethanol, centrifuged at 15,000 rpm at 4° C., and resuspended in RNAse-free water. The concentration of the RNA was determined by measuring the optical density at 260 nm.

[0142] Poly(A) RNA was prepared using an OLIGOTEX mRNA kit (Qiagen) with the following modifications: OLIGOTEX beads were washed in tubes instead of on spin columns, resuspended in elution buffer, and then loaded onto spin columns to recover mRNA. To obtain maximum yield, the mRNA was eluted twice.

[0143] Each poly(A) RNA sample was reverse transcribed using MMLV reverse-transcriptase, 0.05 pg/μl oligo-d(T) primer (21mer), 1×first strand buffer, 0.03 units/ul RNAse inhibitor, 500 uM dATP, 500 uM dGTP, 500 uM dTTP, 40 uM dCTP, and 40 uM either dCTP-Cy3 or dCTP-CyS (APB). The reverse transcription reaction was performed in a 25 ml volume containing 200 ng poly(A) RNA using the GEMBRIGHT kit (Incyte Genomics). Specific control poly(A) RNAs (YCFR06, YCFR45, YCFR67, YCFR85, YCFR43, YCFR22, YCFR23, YCFR25, YCFR44, YCFR26) were synthesized by in vitro transcription from non-coding yeast genomic DNA (W. Lei, unpublished). As quantitative controls, control mRNAs (YCFR06, YCFR45, YCFR67, and YCFR85) at 0.002 ng, 0.02 ng, 0.2 ng, and 2 ng were diluted into reverse transcription reaction at ratios of 1:100,000, 1:10,000, 1:1000, 1:100 (w/w) to sample mRNA, respectively. To sample differential expression patterns, control mRNAs (YCFR43, YCFR22, YCFR23, YCFR25, YCFR44, YCFR26) were diluted into reverse transcription reaction at ratios of 1:3, 3:1, 1:10, 10:1, 1:25, 25:1 (w/w) to sample mRNA. Reactions were incubated at 37° C. for 2 hr, treated with 2.5 ml of 0.5M sodium hydroxide, and incubated for 20 minutes at 85° C. to the stop the reaction and degrade the RNA.

[0144] cDNAs were purified using two successive CHROMA SPIN 30 gel filtration spin columns (Clontech). Cy3- and CyS-labeled reaction samples were combined as described below and ethanol precipitated using 1 ml of glycogen (1 mg/ml), 60 ml sodium acetate, and 300 ml of 100% ethanol. The cDNAs were then dried to completion using a SpeedVAC system (Savant Instruments, Holbrook N.Y.) and resuspended in 14 μl 5×SSC/0.2% SDS.

[0145] VII Hybridization and Detection

[0146] Hybridization reactions contained 9 μl of sample mixture containing 0.2 μg each of Cy3 and Cy5 labeled cDNA synthesis products in 5×SSC, 0.2% SDS hybridization buffer. The mixture was heated to 65° C. for 5 minutes and was aliquoted onto the microarray surface and covered with an 1.8 cm² coverslip. The microarrays were transferred to a waterproof chamber having a cavity just slightly larger than a microscope slide. The chamber was kept at 100% humidity internally by the addition of 140 μl of 5×SSC in a corner of the chamber. The chamber containing the microarrays was incubated for about 6.5 hours at 60° C. The microarrays were washed for 10 min at 45° C. in low stringency wash buffer (1×SSC, 0.1% SDS), three times for 10 minutes each at 45° C. in high stringency wash buffer (0.1×SSC), and dried.

[0147] Reporter-labeled hybridization complexes were detected with a microscope equipped with an Innova 70 mixed gas 10 W laser (Coherent, Santa Clara Calif.) capable of generating spectral lines at 488 nm for excitation of Cy3 and at 632 nm for excitation of Cy5. The excitation laser light was focused on the microarray using a 20×microscope objective (Nikon, Melville N.Y.). The slide containing the microarray was placed on a computer-controlled X-Y stage on the microscope and raster-scanned past the objective. The 1.8 cm×1.8 cm microarray used in the present example was scanned with a resolution of 20 micrometers.

[0148] In two separate scans, the mixed gas multiline laser excited the two fluorophores sequentially. Emitted light was split, based on wavelength, into two photomultiplier tube detectors (PMT R1477; Hamamatsu Photonics Systems, Bridgewater N.J.) corresponding to the two fluorophores. Appropriate filters positioned between the microarray and the photomultiplier tubes were used to filter the signals. The emission maxima of the fluorophores used were 565 nm for Cy3 and 650 nm for Cy5. Each microarray was typically scanned twice, one scan per fluorophore using the appropriate filters at the laser source, although the apparatus was capable of recording the spectra from both fluorophores simultaneously.

[0149] The sensitivity of the scans was calibrated using the signal intensity generated by a cDNA control species. Samples of the calibrating cDNA were separately labeled with the two fluorophores and identical amounts of each were added to the hybridization mixture. A specific location on the microarray contained a complementary DNA sequence, allowing the intensity of the signal at that location to be correlated with a weight ratio of hybridizing species of 1:100,000.

[0150] The output of the photomultiplier tube was digitized using a 12-bit RTI-835H analog-to-digital (A/D) conversion board (Analog Devices, Norwood, Mass.) installed in an IBM-compatible PC computer. The digitized data were displayed as an image where the signal intensity was mapped using a linear 20-color transformation to a pseudocolor scale ranging from blue (low signal) to red (high signal). The data was also analyzed quantitatively. Where two different fluorophores were excited and measured simultaneously, the data were first corrected for optical crosstalk (due to overlapping emission spectra) between the fluorophores using each fluorophore's emission spectrum.

[0151] A grid was superimposed over the fluorescence signal image such that the signal from each spot was centered in each element of the grid. The fluorescence signal within each element was then integrated to obtain a numerical value corresponding to the average intensity of the signal. The software used for signal analysis was the GEMTOOLS gene expression analysis program (Incyte Genomics). Significance was defined as signal to background ratio exceeding 2×and area hybridization exceeding 40%.

[0152] VIII Data Analysis and Results

[0153] Array elements that exhibited at least a two-fold change in expression at one or more time points, a signal intensity over 250 units, a signal-to-background ratio of at least 2.5, and an element spot size of at least 40% were identified as differentially expressed using the GEMTOOLS program (Incyte Genomics). Each of the treatment groups for the prostate tumor cell lines, LNCaP, DU-145, and PC-3 were compared with the untreated cell line, and with normal PrEC cells similarly treated. The cDNAs that are differentially expressed are shown in Table 1 and are divided into treatment groups, and by up- or down-regulated expression. The cDNAs are identified by their SEQ ID NO and TEMPLATE ID, and by the description associated with at least a fragment of a polynucleotide found in GenBank. The descriptions were obtained using the sequences of the Sequence Listing and BLAST analysis.

[0154] IX Other Hybridization Technologies and Analyses

[0155] Other hybridization technologies utilize a variety of substrates such as nylon membranes, capillary tubes, etc. Arranging cDNAs on polymer coated slides is described in EXAMPLE V; sample cDNA preparation and hybridization and analysis using polymer coated slides is described in EXAMPLES VI and VII, respectively.

[0156] The cDNAs are applied to a membrane substrate by one of the following methods. A mixture of cDNAs is fractionated by gel electrophoresis and transferred to a nylon membrane by capillary transfer. Alternatively, the cDNAs are individually ligated to a vector and inserted into bacterial host cells to form a library. The cDNAs are then arranged on a substrate by one of the following methods. In the first method, bacterial cells containing individual clones are robotically picked and arranged on a nylon membrane. The membrane is placed on LB agar containing selective agent (carbenicillin, kanamycin, ampicillin, or chloramphenicol depending on the vector used) and incubated at 37° C. for 16 hr. The membrane is removed from the agar and consecutively placed colony side up in 10% SDS, denaturing solution (1.5 M NaCl, 0.5 M NaOH), neutralizing solution (1.5 M NaCl, 1 M Tris, pH 8.0), and twice in 2×SSC for 10 min each. The membrane is then UV irradiated in a STRATALINKER UV-crosslinker (Stratagene).

[0157] In the second method, cDNAs are amplified from bacterial vectors by thirty cycles of PCR using primers complementary to vector sequences flanking the insert. PCR amplification increases a starting concentration of 1-2 ng nucleic acid to a final quantity greater than 5 μg. Amplified nucleic acids from about 400 bp to about 5000 bp in length are purified using SEPHACRYL-400 beads (APB). Purified nucleic acids are arranged on a nylon membrane manually or using a dot/slot blotting manifold and suction device and are immobilized by denaturation, neutralization, and UV irradiation as described above.

[0158] Hybridization probes derived from cDNAs of the Sequence Listing are employed for screening cDNAs, mRNAs, or genomic DNA in membrane-based hybridizations. Probes are prepared by diluting the cDNAs to a concentration of 40-50 ng in 45 μl TE buffer, denaturing by heating to 100° C. for five min, and briefly centrifuging. The denatured cDNA is then added to a REDIPRIME tube (APB), gently mixed until blue color is evenly distributed, and briefly centrifuged. Five microliters of [³²P]dCTP is added to the tube, and the contents are incubated at 37° C. for 10 min. The labeling reaction is stopped by adding 5,ul of 0.2M EDTA, and probe is purified from unincorporated nucleotides using a PROBEQUANT G-50 microcolumn (APB). The purified probe is heated to 100° C. for five min, snap cooled for two min on ice.

[0159] Membranes are pre-hybridized in hybridization solution containing 1% Sarkosyl and 1×high phosphate buffer (0.5 M NaCl, 0.1 M Na₂HPO₄, 5 mM EDTA, pH 7) at 55° C. for two hr. The probe, diluted in 15 ml fresh hybridization solution, is then added to the membrane. The membrane is hybridized with the probe at 55° C. for 16 hr. Following hybridization, the membrane is washed for 15 min at 25° C. in 1 mM Tris (pH 8.0), 1% Sarkosyl, and four times for 15 min each at 25° C. in 1 mM Tris (pH 8.0). To detect hybridization complexes, XOMAT-AR film (Eastman Kodak, Rochester N.Y.) is exposed to the membrane overnight at −70° C., developed, and examined.

[0160] X Further Characterization of Differentially Expressed cDNAs and Proteins

[0161] Clones were compared with the sequences in the LIFESEQ Gold 5.1 database (Incyte Genomics) using BLAST analysis, and an Incyte template and its variants were chosen for each clone. The template and variants were compared with the sequences in the GenBank database using BLAST analysis to acquire annotation. The nucleotide sequences were translated into amino acid sequence which was compared against the sequences in the GENPEPT and other protein databases using BLAST analysis to acquire annotation and other characterization such as domains and structural and functional motifs.

[0162] Percent sequence identity can also be determined electronically for two or more amino acid or nucleic acid sequences using the MEGALIGN program of LASERGENE software (DNASTAR). The percent similarity between two amino acid sequences is calculated by dividing the length of sequence A, minus the number of gap residues in sequence A, minus the number of gap residues in sequence B, into the sum of the residue matches between sequence A and sequence B, times one hundred. Gaps of low or of no homology between the two amino acid sequences are not included in determining percentage similarity.

[0163] Sequences with conserved protein motifs may be searched using the BLOCKS search program. This program analyses sequence information contained in the Swiss-Prot and PROSITE databases and is useful for determining the classification of uncharacterized proteins translated from genomic or cDNA sequences (Bairoch.(supra); Attwood (supra). PROSITE database is a useful source for identifying functional or structural domains that are not detected using motifs due to extreme sequence divergence. Using weight matrices, these domains are calibrated against the SWISS-PROT database to obtain a measure of the chance distribution of the matches.

[0164] The PRINTS database can be searched using the BLIMPS search program to obtain protein family “fingerprints”. The PRINTS database complements the PROSITE database by exploiting groups of conserved motifs within sequence alignments to build characteristic signatures of different protein families. For both BLOCKS and PRINTS analyses, the cutoff scores for local similarity were: >1300=strong, 1000-1300=suggestive; for global similarity were: p<exp-3; and for strength (degree of correlation) were: >1300=strong, 1000-1300=weak.

[0165] XI Expression of the Encoded Protein

[0166] Expression and purification of a protein encoded by a cDNA of the invention is achieved using bacterial or virus-based expression systems. For expression in bacteria, cDNA is subcloned into a vector containing an antibiotic resistance gene and an inducible promoter that directs high levels of cDNA transcription. Examples of such promoters include, but are not limited to, the trp-lac (tac) hybrid promoter and the T5 or T7 bacteriophage promoter in conjunction with the lac operator regulatory element. Recombinant vectors are transformed into bacterial hosts, such as BL21(DE3). Antibiotic resistant bacteria express the protein upon induction with IPTG. Expression in eukaryotic cells is achieved by infecting Spodoptera frugiperda (Sf9) insect cells with recombinant baculovirus, Autographica californica nuclear polyhedrosis virus. The polyhedrin gene of baculovirus is replaced with the cDNA by either homologous recombination or bacterial-mediated transposition involving transfer plasmid intermediates. Viral infectivity is maintained and the strong polyhedrin promoter drives high levels of transcription.

[0167] For ease of purification, the protein is synthesized as a fusion protein with glutathione-S-transferase (GST; APB) or a similar alternative such as FLAG. The fusion protein is purified on immobilized glutathione under conditions that maintain protein activity and antigenicity. After purification, the GST moiety is proteolytically cleaved from the protein with thrombin. A fusion protein with FLAG, an 8-amino acid peptide, is purified using commercially available monoclonal and polyclonal anti-FLAG antibodies (Eastman Kodak, Rochester N.Y.).

[0168] XII Production of Specific Antibodies

[0169] A denatured protein from a reverse phase HPLC separation is obtained in quantities up to 75 mg. This denatured protein is used to immunize mice or rabbits following standard protocols. About 100 Itg is used to immunize a mouse, while up to 1 mg is used to immunize a rabbit. The denatured protein is radioiodinated and incubated with murine B-cell hybridomas to screen for monoclonal antibodies. About 20 mg of protein is sufficient for labeling and screening several thousand clones.

[0170] In another approach, the amino acid sequence translated from a cDNA of the invention is analyzed using PROTEAN software (DNASTAR) to determine regions of high antigenicity, essentially antigenically-effective epitopes of the protein. The optimal sequences for immunization are usually at the C-terminus, the N-terminus, and those intervening, hydrophilic regions of the protein that are likely to be exposed to the external environment when the protein is in its natural conformation. Typically, oligopeptides about 15 residues in length are synthesized using an 431 Peptide synthesizer (ABI) using Fmoc-chemistry and then coupled to keyhole limpet hemocyanin (KLH; Sigma Aldrich) by reaction with M-maleimidobenzoyl-N-hydroxysuccinimide ester. If necessary, a cysteine may be introduced at the N-terminus of the peptide to permit coupling to KLH. Rabbits are immunized with the oligopeptide-KLH complex in complete Freund's adjuvant. The resulting antisera are tested for antipeptide activity by binding the peptide to plastic, blocking with 1% BSA, reacting with rabbit antisera, washing, and reacting with radioiodinated goat anti-rabbit IgG.

[0171] Hybridomas are prepared and screened using standard techniques. Hybridomas of interest are detected by screening with radioiodinated protein to identify those fusions producing a monoclonal antibody specific for the protein. In a typical protocol, wells of 96 well plates (FAST, Becton-Dickinson, Palo Alto Calif.) are coated with affinity-purified, specific rabbit-anti-mouse (or suitable anti-species Ig) antibodies at 10 mg/ml. The coated wells are blocked with 1% BSA and washed and exposed to supernatants from hybridomas. After incubation, the wells are exposed to radiolabeled protein at 1 mg/ml. Clones producing antibodies bind a quantity of labeled protein that is detectable above background.

[0172] Such clones are expanded and subjected to 2 cycles of cloning at 1 cell/3 wells. Cloned hybridomas are injected into pristane-treated mice to produce ascites, and monoclonal antibody is purified from the ascitic fluid by affinity chromatography on protein A (APB). Monoclonal antibodies with affinities of at least 10⁸ M⁻¹, preferably 10⁹ to 10¹⁰ M⁻¹ or stronger, are made by procedures well known in the art.

[0173] XIII Purification of Naturally Occurring Protein Using Specific Antibodies

[0174] Naturally occurring or recombinant protein is substantially purified by immunoaffinity chromatography using antibodies specific for the protein. An immunoaffinity column is constructed by covalently coupling the antibody to CNBr-activated SEPHAROSE resin (APB). Media containing the protein is passed over the immunoaffinity column, and the column is washed using high ionic strength buffers in the presence of detergent to allow preferential absorbance of the protein. After coupling, the protein is eluted from the column using a buffer of pH 2-3 or a high concentration of urea or thiocyanate ion to disrupt antibody/protein binding, and the protein is collected.

[0175] XIV Screening Molecules for Specific Binding with the cDNA or Protein

[0176] The cDNA or fragments thereof and the protein or portions thereof are labeled with ³²P-dCTP, Cy3-dCTP, Cy5-dCTP (APB), or BIODIPY or FITC (Molecular Probes), respectively. Candidate molecules or compounds previously arranged on a substrate are incubated in the presence of labeled nucleic or amino acid. After incubation under conditions for either a cDNA or a protein, the substrate is washed, and any position on the substrate retaining label, which indicates specific binding or complex formation, is assayed. The binding molecule is identified by its arrayed position on the substrate. Data obtained using different concentrations of the nucleic acid or protein are used to calculate affinity between the labeled nucleic acid or protein and the bound molecule. High throughput screening using very small assay volumes and very small amounts of test compound is fully described in U.S. Pat. No. 5,876,946, incorporated by reference herein.

[0177] All patents and publications mentioned in the specification are herein incorporated by reference. Various modifications and variations of the described method and system of the invention will be apparent to those skilled in the art without departing from the scope and spirit of the invention. Although the invention has been described in connection with specific preferred embodiments, it should be understood that the invention as claimed should not be unduly limited to such specific embodiments. Indeed, various modifications of the described modes for carrying out the invention that are obvious to those skilled in the field of molecular biology or related fields are intended to be within the scope of the following claims.

TABLE 1

| | | | | | |
|---|---|---|---|---|---|
| SEQ | | | | | |
| ID | TEMPLATE | GI | | | Cell |
| N0 | ID | Number | E-Value | Annotation | Line |

Androgen treated, downregulated

| | | | | | |
|---|---|---|---|---|---|
| 1 | 441269.2 | g2895090 | 0 | Human RalBP1-interacting protein (POB1) mRNA, complete cds. | LNCaP |
| 2 | 3161.5 | g6996441 | 0 | Human CTL1 gene. | LNCaP |
| 3 | 977955.7 | g438372 | 0 | Human mRNA for protein kinase C mu. | LNCaP |
| 4 | 350754.2 | g307503 | 0 | Human transglutaminase E3 (TGASE3) mRNA, complete cds. | LNCaP |
| 5 | 235191.4 | g2062372 | 0 | Human cyclin-selective ubiquitin carrier protein mRNA, complete cds. | LNCaP |
| 6 | 1099593.13 | g1702923 | 0 | Human mRNA for p0071 protein. | LNCaP |
| 7 | 1099593.2 | g1702923 | 0 | Human mRNA for p0071 protein. | LNCaP |
| 8 | 003161.7c | g6996441 | 0 | Human CTL1 gene. | LNCaP |
| 9 | 415650.5 | g190663 | 0 | Human prostate-specific membrane antigen (PSM) mRNA, complete cds. | LNCaP |
| 10 | 204401.1 | g2970122 | 0 | Human prostate-specific membrane antigen (PSM) gene, complete cds. | LNCaP |
| 11 | 347915.14 | g1503997 | 0 | Human mRNA for KIAA0207 gene, complete cds. | LNCaP |
| 12 | 997395.1 | g307513 | 0 | Human transducin-like enhancer protein (TLE3) mRNA, complete cds. | LNCaP |
| 13 | 332783.1 | g2795902 | 0 | Human clone 23860 mRNA sequence. | LNCaP |
| 14 | 422289.1 | | | Incyte Unique | LNCaP |
| 15 | 899410.5 | g4165324 | 0 | Human plasma membrane calcium ATPase isoform 1 (ATP2B1) gene, alternative | LNCaP |
| | | | | splice products, partial cds. | |
| 16 | 404155.2 | g1255601 | 0 | Human mRNA for cGMP-dependent protein kinase type I alpha, complete cds. | LNCaP |
| 17 | 412065.22 | g1374791 | 0 | Human selenium-binding protein (hSBP) mRNA, complete cds. | LNCaP |
| 18 | 412065.2 | g1374791 | 7.00E−92 | Human selenium-binding protein (hSBP) mRNA, complete cds. | LNCaP |
| 19 | 345860.21 | g29709 | 0 | Human mRNA for cathepsin H (EC 3.4.22.16). | LNCaP |
| 20 | 199101.1 | g1296629 | 0 | Human mRNA for UDP-GalNAc: polypeptide N-acetylgalactosaminyl transferase | LNCaP |
| | | | | (GalNAc-T3). | |
| 21 | 196606.8c | g2924334 | 0 | Human mRNA for exportin (tRNA). | LNCaP |
| 22 | 475146.3 | g619876 | 0 | Human mRNA for 3-hydroxy-3-methylglutaryl CoA synthase. | LNCaP |
| 23 | 474069.8 | g7020654 | 0 | unnamed protein product [Homo sapiens] | LNCaP |
| 24 | 255115.2 | g5881245 | 0 | Human UDP-glucuronosyltransferase 2B15 (UGT2B15) mRNA, UGT2B15-Y85 | LNCaP |
| | | | | allele, complete cds. | |
| 25 | 255115.4 | g3287472 | 0 | Human C19steroid specific UDP-glucuronosyltransferase mRNA, complete cds. | LNCaP |
| 26 | 216331.1 | | | Incyte Unique | LNCaP |
| 27 | 482517.3 | g6721135 | 0 | Homo sapiens chromosome 14 clone CTD-2547F10, complete | LNCaP |
| 28 | 480653.1 | g6841247 | 0 | Human HSPC299 mRNA, partial cds. | LNCaP |
| 29 | 978047.1 | g2852631 | 0 | Human clone 23649 and 23755 unknown mRNA, partial cds. | LNCaP |
| 30 | 330977.1c | g183784 | 0 | Human androgen receptor (hAR) gene sequence. | LNCaP |
| 31 | 343502.9 | g3779225 | 0 | Human secreted cement gland protein XAG-2 homolog (hAG-2/R) mRNA, | LNCaP |
| | | | | complete cds. | |
| 32 | 903104.11c | g181122 | 0 | Human cleavage signal 1 protein mRNA, complete cds. | LNCaP |
| 33 | 898068.6 | g6714698 | 0 | Human mRNA for sugar transporter (SLC2A6 gene). | LNCaP |
| 34 | 903104.1 | g181122 | 5.00E−55 | Human cleavage signal 1 protein mRNA, complete cds. | LNCaP |
| 35 | 903104.8 | g181122 | 0 | Human cleavage signal 1 protein mRNA, complete cds. | LNCaP |
| 36 | 412065.21 | g1374791 | 0 | Human selenium-binding protein (hSBP) mRNA, complete cds. | LNCaP |
| 37 | 399067.1 | g3157804 | 6.60E−257 | neuronal leucine-rich repeat protein | LNCaP |
| 38 | 237709.11 | g6172220 | 0 | Human SPON2 mRNA for spondin 2, complete cds. | LNCaP |
| 39 | 237709.5 | g6172220 | 0 | Human SPON2 mRNA for spondin 2, complete cds. | LNCaP |
| 40 | 216437.4 | | | Incyte Unique | LNCaP |
| 41 | 255824.52 | g178350 | 0 | Human aldolase A mRNA, complete cds. | LNCaP |
| 42 | 27798.1 | g6453517 | 0 | Human mRNA; cDNA DKFZp434M1317 (from clone DKFZp434M1317). | LNCaP |
| 43 | 60671.7 | g3043675 | 0 | Human mRNA for KIAA0576 protein, partial cds. | LNCaP |
| 44 | 376085.9 | g6453582 | 0 | Human mRNA; cDNA DKFZp434G1221 (from clone DKFZp434G1221). | LNCaP |
| 45 | 404467.1 | g4826465 | 1.20E−56 | dJ287G14.2 (PUTATIVE novel seven transmembrane domain protein) | LNCaP |
| 46 | 903508.12 | g5262490 | 0 | Human mRNA; cDNA DKFZp564D0462 (from clone DKFZp564D0462). | LNCaP |
| 47 | 334387.1 | g632497 | 0 | Human cleavage stimulation factor 77 kDa subunit mRNA, complete cds. | LNCaP |
| 48 | 290403.5 | g6808173 | 0 | Human mRNA; cDNA DKFZp564M1178 (from clone DKFZp564M1178); partial | LNCaP |
| 49 | 391406.5 | g187701 | 0 | Human MHC protein homologous to chicken B complex protein mRNA, complete | LNCaP |
| 50 | 391406.24 | g187701 | 0 | Human MHC protein homologous to chicken B complex protein mRNA, complete | LNCaP |
| 51 | 474588.21 | g339700 | 0 | Human polyadenylate binding protein (TIA-1) mRNA, complete cds. | LNCaP |
| 52 | 124541.1 | | | Incyte Unique | LNCaP |
| 53 | 246862.9 | g28937 | 0 | Human mRNA for mitochondrial ATP synthase (F1-ATPase) alpha subunit. | LNCaP |
| 54 | 246862.17 | g28937 | 0 | Human mRNA for mitochondrial ATP synthase (F1-ATPase) alpha subunit. | LNCaP |
| 55 | 13040.1 | | | Incyte Unique | LNCaP |
| 56 | 236480.3 | g1556398 | 0 | Human mRNA for FAN protein. | LNCaP |

Androgen treated, upregulated

| | | | | | |
|---|---|---|---|---|---|
| 57 | 314831.5 | g31920 | 0 | Human GST1-Hs mRNA for GTP-binding protein. | LNCaP |
| 58 | 391940.1 | g32451 | 0 | Human pHS1-2 mRNA with ORF homologous to membrane receptor proteins. | LNCaP |
| 59 | 454958.13 | g182482 | 0 | Human fibroblast collagenase inhibitor mRNA, complete cds. | LNCaP |
| 60 | 1090481.2c | g189152 | 2.00E−12 | Human oligodendrocyte myelin glycoprotein (OMG) exons 1-2; | LNCaP |
| | | | | neurofibromatosis 1 (NF1) exons 28-49; ecotropic viral integration site 2B | |
| | | | | (EVI2B) exons 1-2; ecotropic viral integration site 2A (EVI2A) exons 1-2; | |
| 61 | 238203.11 | g340236 | 0 | Human vinculin mRNA, complete cds. | LNCaP |
| 62 | 994057.21 | g531475 | 0 | Human PPP1CB mRNA. | LNCaP |
| 63 | 346730.5 | g2463627 | 0 | Human putative monocarboxylate transporter (MCT) mRNA, complete cds. | LNCaP |
| 64 | 346730.2c | g2463627 | 0 | Human putative monocarboxylate transporter (MCT) mRNA, complete cds. | LNCaP |
| 65 | 458903.1 | g34055 | 7.00E−14 | Human K7 gene for simple epithelial cell keratin K7 (exon 4). | LNCaP |
| 66 | 482336.2 | g34067 | 0 | Human mRNA fragment for mesothelial type II keratin K7. | LNCaP |
| 67 | 482336.14 | g34067 | 0 | Human mRNA fragment for mesothelial type II keratin K7. | LNCaP |
| 68 | 66522.1 | | | Incyte Unique | LNCaP |
| 69 | 300294.3 | g1256819 | 0 | Human signal recognition particle (SRP54) mRNA, complete cds. | LNCaP |
| 70 | 474372.8 | g6807723 | 0 | Human mRNA; cDNA DKFZp434J1114 (from clone DKFZp434J1114); partial | LNCaP |
| 71 | 475028.7 | g575271 | 0 | Human SPHAR gene for cyclin-related protein. | LNCaP |
| 72 | 481223.3 | g2909359 | 0 | Human mRNA for Sox10 protein. | LNCaP |
| 73 | 332499.1 | g7022927 | 9.00E−38 | unnamed protein product [Homo sapiens] | LNCaP |
| 74 | 234340.7 | g4007417 | 0 | Human Ets transcription factor PDEF (PDEF) mRNA, complete cds. | LNCaP |
| 75 | 234340.15c | g6721497 | 0 | Human PSE mRNA for prostate ets, complete cds. | LNCaP |
| 76 | 255778.11 | g1373172 | 0 | Human NADH: ubiquinone oxidoreductase subunit B13 (B13) mRNA, complete | LNCaP |
| 77 | 317586.1 | g3265061 | 0 | Human N-acetyltransferase-1 (NAT1) gene, NAT1*26B allele, complete cds. | LNCaP |
| 78 | 1093574.1c | g3335147 | 0 | Human short form transcription factor C-MAF (c-maf) mRNA, complete cds. | LNCaP |
| 79 | 355658.1 | | | Incyte Unique | LNCaP |
| 80 | 201342.4 | g5199315 | 0 | Human non-ocogenic Rho GTPase-specific GTP exchange factor (proto-LBC) | LNCaP |
| | | | | mRNA, complete cds. | |
| 81 | 204542.1 | g6425039 | 0 | Human N-acetylglucosamine-1-phosphodiester alpha-N-acetylglucosaminidase | LNCaP |
| | | | | mRNA, complete cds. | |
| 82 | 428742.1 | | | Incyte Unique | LNCaP |
| 83 | 204386.1 | g7020228 | 1.00E−128 | unnamed protein product [Homo sapiens] | LNCaP |
| 84 | 335086.1 | g1543067 | 0 | Human Has2 mRNA, complete cds. | LNCaP |
| 85 | 228302.1 | | | Incyte Unique | LNCaP |
| 86 | 1063057.1 | g488552 | 0 | Human zinc finger protein ZNF134 mRNA, complete cds. | LNCaP |

EGF treated, downregulated

| | | | | | |
|---|---|---|---|---|---|
| 87 | 199905.1 | g3449309 | 0 | Human mRNA for MEGF9, partial cds. | DU145 |
| 88 | 11329.1 | g4835609 | 0 | Homo sapiens genomic DNA, chromosome 21q22.1, D21S226-AML | LNCaP |
| 89 | 237536.18 | g4165090 | 0 | Human NADH-ubiquinone oxidoreductase PDSW subunit mRNA, complete cds. | DU145 |
| 90 | 330878.6 | g5565654 | 0 | Human cullin 4A (CUL4A) mRNA, complete cds. | DU145 |
| 91 | 331793.11 | g5262498 | 0 | Human mRNA; cDNA DKFZp564G2362 (from clone DKFZp564G2362). | DU145 |
| 92 | 902895.2 | g4003380 | 5.00E−09 | Human genomic DNA of 8p21.3-p22 anti-oncogene of hepatocellular colorectal | DU145 |
| | | | | and non-small cell lung cancer, segment 3/11. | |
| 93 | 7273.1 | g5918013 | 0 | Human DNA sequence from clone 423B22 on chromosome 1p33-35.3, | PC3 |
| 94 | 190771.2 | g5911950 | 0 | Human mRNA; cDNA DKFZp727G051 (from clone DKFZp727G051); partial | DU145 |
| 95 | 1095702.14 | g187282 | 0 | Human cation-dependent mannose 6-phosphate-specific receptor mRNA, | DU145 |
| | | | | complete cds. | |
| 96 | 1095702.4c | g187282 | 0 | Human cation-dependent mannose 6-phosphate-specific receptor mRNA, | DU145 |
| | | | | complete cds. | |
| 97 | 977667.1 | g179699 | 0 | Human C5a anaphylatoxin receptor mRNA, complete cds. | DU145 |
| 98 | 253534.14 | g5410450 | 0 | Human interferon-induced protein p78 (MX1) gene, complete cds. | PC3 |
| 99 | 1136709.5 | g187273 | 0 | Human eosinophil Charcot-Leyden crystal (CLC) protein (lysophospholipase) | PC3 |
| | | | | mRNA, complete cds. | |
| 100 | 1136709.6 | g187273 | 0 | Human eosinophil Charcot-Leyden crystal (CLC) protein (lysophospholipase) | PC3 |
| | | | | mRNA, complete cds. | |
| 101 | 382293.16 | g3676496 | 0 | Human inducible 6-phosphofructo-2-kinase/fructose 2,6-bisphosphatase (IPFK-2) | DU145 |
| | | | | mRNA, complete cds. | |
| 102 | 382293.15 | g29542 | 0 | Human mRNA for complement component Cls. | DU145 |
| 103 | 235943.39c | g37053 | 0 | Human mRNA for transmembrane epithelial tumour mucin antigen. | DU145 |
| 104 | 235943.36 | g2055365 | 0 | Human polymorphic epithelial mucin (PEM) gene, complete cds. | DU145 |
| 105 | 401434.1 | g4914611 | 0 | Human mRNA; cDNA DKFZp586B2023 (from clone DKFZp586B2023). | DU145 |
| 106 | 234107.2 | g603559 | 0 | Human LU gene for Lutheran blood group glycoprotein. | DU145 |
| 107 | 233660.2c | g3879501 | 1.10E−41 | similar to ubiquitin carboxyl-terminal hydrolase; cDNA EST EMBL: D33366 | DU145 |
| | | | | comes from this gene; cDNA EST EMBL: D33965 comes from this gene; cDNA | |
| | | | | EST EMBL: D33822 comes from this gene; cDNA EST EMBL: D34547 comes | |
| | | | | from this gene; cDNA EST EMBL: D37684 | |
| 108 | 482423.1 | g2808656 | 0 | Human complete genomic sequence between D16S3070 and D16S3275, | DU145 |
| | | | | containing Familial Mediterranean Fever gene disease. | |
| 109 | 441298.14 | g3327137 | 0 | Human mRNA for KIAA0662 protein, partial cds. | DU145 |
| 110 | 235333.1 | | | Incyte Unique | DU145 |
| 111 | 221872.11c | g5771534 | 0 | Human secreted protein of unknown function (SPUF), mRNA, complete cds. | DU145 |
| 112 | 992317.12 | | | Incyte Unique | DU145 |
| 113 | 230936.6 | g4929618 | 0 | Human CGI-75 protein mRNA, complete cds. | DU145 |
| 114 | 029508.1c | | | | DU145 |
| 115 | 984900.1 | g3881473 | 8.7 | ZK1037.11 [Caenorhabditis elegans] | DU145 |
| 116 | 405158.1 | g6807861 | 0 | Human mRNA; cDNA DKFZp434A0225 (from clone DKFZp434A0225). | DU145 |
| 117 | 334177.1 | | | Incyte Unique | DU145 |
| 118 | 480187.81 | g338928 | 0 | Human T-cell receptor active beta-chain V-D-J-beta-1.2-C-beta-1 (TCRB) | DU145 |
| | | | | mRNA, partial cds. | |
| 119 | 62042.4 | g6808161 | 0 | Human mRNA; cDNA DKFZp761O051 (from clone DKFZp761O051). | DU145 |
| 120 | 1087696.7 | g4929632 | 0 | Human CGI-82 protein mRNA, complete cds. | DU145 |
| 121 | 259805.28 | g189511 | 0 | Human protein p78 mRNA, complete cds. | DU145 |
| 122 | 399128.1 | | | Incyte Unique | DU145 |
| 123 | 986565.15 | g5514676 | 0 | Human mRNA for thiamine transporter (THTR-1), partial. | DU145 |
| 124 | 978378.3 | g4001636 | 5.00E−41 | Human DNA, anonymous heat-stable fragment RP8-8. | DU145 |
| 125 | 979575.2c | | | | DU145 |
| 126 | 233594.4 | g6721505 | 0.85 | hypothetical protein [Oryza sativa] | DU145 |
| 127 | 238635.1 | g219534 | 0 | Human CGM1a mRNA for CD66d. | DU145 |
| 128 | 1080496.1 | g4500232 | 0 | Human mRNA; cDNA DKFZp586B1122 (from clone DKFZp586B1122). | DU145 |
| 129 | 351204.2 | g35687 | 0 | Human mRNA for protease 3. | DU145 |
| 130 | 235394.5 | | | Incyte Unique | DU145 |
| 131 | 403242.1 | g5725470 | 0 | Human mRNA full length insert cDNA clone EUROIMAGE 1035904. | DU145 |
| 132 | 427529.9 | g4884083 | 0 | Human mRNA; cDNA DKFZp564O243 (from clone DKFZp564O243); partial | DU145 |
| 133 | 474868.2 | g3603460 | 0 | Human heat shock protein hsp40-3 mRNA, complete cds. | DU145 |
| 134 | 1095839.17 | g4929742 | 0 | Human CGI-137 protein mRNA, complete cds. | DU145 |
| 135 | 1095839.1 | g4050043 | 0 | Human RAD17 isoform 4 (RAD17) mRNA, complete cds. | DU145 |
| 136 | 244251.4 | | | Incyte Unique | DU145 |
| 137 | 21555.1 | | | Incyte Unique | DU145 |
| 138 | 234157.3 | g6716409 | 0 | Human chromosome 16 open reading frame 5 (C16orf5) mRNA, complete cds. | LNCaP |
| 139 | 903478.1 | | | Incyte Unique | LNCaP |
| 140 | 411296.2 | g183911 | 0 | Human hemopoietic cell protein-tyrosine kinase (HCK) gene, complete cds, clone | DU145 |
| | | | | lambda-a2/1a. | |
| 141 | 18044.1 | g4929732 | 1.00E−15 | Human CGI-132 protein mRNA, complete cds. | DU145 |
| 142 | 407260.2 | g7022708 | 0 | unnamed protein product [Homo sapiens] | PC3 |
| 143 | 978765.2 | | | Incyte Unique | DU145 |
| 144 | 338274.1 | | | Incyte Unique | DU145 |
| 145 | 231270.1 | g829258 | 3.00E−04 | Chitinase [Beta vulgaris] | DU145 |
| 146 | 18092.1 | | | Incyte Unique | DU145 |
| 147 | 404197.8c | | | | DU145 |
| 148 | 404197.4 | g3746548 | 0 | Human cyclin K (CPR4) mRNA, complete cds. | DU145 |
| 149 | 5460.1 | g4914518 | 0 | Human DNA sequence from clone CTA-216E10 on chromosome 22 | DU145 |
| 150 | 346511.4 | g338651 | 0 | Human 69 kDa 2′5′ oligoadenylate synthetase (P69 2-5A synthetase) mRNA, | PC3 |
| | | | | complete cds. | |
| 151 | 346511.6 | g338653 | 0 | Human 71 kDa 2′5′ oligoadenylate synthetase (p69 2-5A synthetase) mRNA, | PC3 |
| | | | | complete cds. | |
| 152 | 331233.2 | g437379 | 0 | Human potassium voltage-gated channel (KCNC1) mRNA. | DU145 |
| 153 | 234056.5 | g6164748 | 0 | Human F-box protein Fbx23 (FBX23) mRNA, partial cds. | DU145 |

EGF treated, upregulated

| | | | | | |
|---|---|---|---|---|---|
| 154 | 238118.1 | g4558635 | 0 | Homo sapiens chromosome 19, BAC 82621 (CIT-B-139a18), complete | PC3 |
| 155 | 233596.5 | g7209311 | 2.00E−40 | FLJ00005 protein [Homo sapiens] | PC3 |
| 156 | 988653.1 | g31129 | 0 | Human mRNA for early growth response protein 1 (hEGR1). | LNCaP |
| 157 | 470468.26 | g1050524 | 0 | Human mRNA for uridine phosphorylase. | DU145 |
| 158 | 470468.25 | g1050524 | 0 | Human mRNA for uridine phosphorylase. | DU145 |
| 159 | 903479.3 | g3882330 | 0 | Human mRNA for KIAA0805 protein, partial cds. | PC3 |
| 160 | 267918.1 | | | Incyte Unique | PC3 |
| 161 | 1094412.1 | g1143491 | 0 | Human mRNA for BiP protein. | DU145 |
| 162 | 1094107.1 | g1143491 | 0 | Human mRNA for BiP protein. | DU145 |
| 163 | 218452.4 | g575265 | 0 | Human PPP1R3 mRNA for protein phosphatase 1, glycogen-binding regulatory | PC3 |
| | | | | subunit. | |

FGF treated, downregulated

| | | | | | |
|---|---|---|---|---|---|
| 164 | 12178.2 | | | Incyte Unique | DU145 |
| 165 | 100653.3 | g436999 | 0 | Human HRY gene, complete cds. | PC3 |
| 166 | 978478.4 | | | Incyte Unique | PC3 |
| 167 | 85942.2 | | | Incyte Unique | PC3 |
| 168 | 85942.3 | | | Incyte Unique | PC3 |
| 169 | 977470.16c | g392426 | 0 | Human zinc-finger protein (bcl-6) mRNA, complete cds. | PC3 & DU14 |
| 170 | 283762.2 | g1469867 | 0 | Human mRNA for KIAA0143 gene, partial cds. | PC3 |
| 171 | 331065.2 | g537293 | 0 | Human negative regulator of programmed cell death ICH-1S (Ich-1) mRNA, | PC3 |
| | | | | complete cds. | |
| 172 | 331065.5 | g537291 | 0 | Human positive regulator of programmed cell death ICH-1L (Ich-1) mRNA, | PC3 |
| | | | | complete cds. | |
| 173 | 252782.4 | g6103638 | 0 | Human F-box protein FBL5 mRNA, partial cds. | PC3 |
| 174 | 229068.1 | g2687858 | 4.00E−62 | renal organic anion transporter [Pseudopleuronectes americanus] | DU145 |
| 175 | 407450.7 | g1066391 | 0 | Human t(3; 5)(q25.1; p34) fusion gene NPM-MLF1 mRNA, complete cds. | DU145 |
| 176 | 200163.2 | g5817262 | 0 | Human mRNA; cDNA DKFZp566C224 (from clone DKFZp566C224). | DU145 |
| 177 | 200163.12c | g5817262 | 0 | Human mRNA; cDNA DKFZp566C224 (from clone DKFZp566C224). | DU145 |
| 178 | 1328237.4 | g453578 | 0 | Human mRNA for proto-oncogene protein, complete cds. | PC3 |
| 179 | 333965.1 | g1695872 | 0 | Human ser-thr protein kinase PK428 mRNA, complete cds. | PC3 |
| 180 | 1328236.5 | g474898 | 0 | Human cellular growth-regulating protein mRNA, complete cds. | PC3 |
| 181 | 995534.3 | g2290529 | 0 | Human WD repeat protein HAN11 mRNA, complete cds. | DU145 |
| 182 | 1098887.1 | g1698719 | 0 | Human zinc finger protein mRNA, complete cds. | DU145 |
| 183 | 268733.1 | g4753278 | 1.00E−132 | Homo sapiens PAC clone RP5-85011 from 7q31.2-q32, complete | PC3 & DU14 |
| 184 | 470023.2 | g177830 | 0 | Human alpha-1-antitrypsin gene (S variant), complete cds. | DU145 |
| 185 | 989966.8 | g3377596 | 0 | Human full length insert cDNA YO54H04. | DU145 |
| 186 | 233925.5 | g773643 | 0 | Human heterogeneous ribonucleoprotein A0 mRNA, complete cds. | PC3 |
| 187 | 405145.5 | g3252778 | 0 | Human mRNA for 3′,5′-cyclic GMP phosphodiesterase, complete cds. | DU145 |
| 188 | 261982.8 | g2306765 | 0 | Human zinc finger helicase (Znf-HX) mRNA, complete cds. | DU145 |
| 188 | 261982.8 | g2306765 | 0 | Human zinc finger helicase (Znf-HX) mRNA, complete cds. | PC3 |
| 189 | 246285.1 | g339432 | 0 | Human (clone CR-3) teratocarcinoma-derived growth factor 3 (TDGF3) mRNA, | DU145 |
| | | | | complete cds. | |
| 190 | 228511.1 | | | Incyte Unique | DU145 |
| 191 | 40290.1 | g1854440 | 4.9 | polyprotein [Turnip mosaic virus] | DU145 |
| 192 | 399465.3 | g1469194 | 0 | Human mRNA for KIAA0136 gene, partial cds. | DU145 |
| 193 | 898850.21 | g187382 | 0 | Human microtubule-associated protein 4 mRNA, complete cds. | PC3 & DU14 |
| 194 | 201356.1 | | | Incyte Unique | PC3 & DU14 |
| 195 | 223285.1 | g30413 | 1.00E−12 | Human dinucleotide repeat polymorphism at the D21S65 locus. | DU145 |
| 196 | 318000.4 | g5817188 | 0 | Human mRNA; cDNA DKFZp566L034 (from clone DKFZp566L034). | DU145 |
| 197 | 977887.1 | g1504017 | 0 | Human mRNA for KIAA0218 gene, complete cds. | PC3 |
| 198 | 1094199.1 | g2584879 | 0 | Human thyroid hormone receptor activator molecule (TRAM-1) mRNA, complete | PC3 |
| 199 | 1094984.12 | g2331249 | 7.00E−25 | Human Amplified in Breast Cancer (AIB1) mRNA, complete cds. | PC3 |
| 200 | 244785.3 | g4454679 | 0 | Human NADH-ubiquinone oxidoreductase subunit B14.5B homolog mRNA, | PC3 |
| | | | | complete cds. | |
| 201 | 242278.1c | | | | DU145 |
| 202 | 113621.5 | g5817115 | 0 | Human mRNA; cDNA DKFZp586J021 (from clone DKFZp586J021). | DU145 |
| 203 | 401532.2 | g1574997 | 0 | Human canalicular multispecific organic anion transporter (cMOAT), gene, | PC3 |
| | | | | complete cds. | |
| 204 | 006985.1c | | | | PC3 |
| 205 | 351209.14 | g556808 | 0 | Human genes for acid sphingomyelinase ASM. | PC3 & DU14 |
| 206 | 351209.16 | g402620 | 0 | Human mRNA for sphingomyelinase. | PC3 & DU14 |
| 207 | 475819.14 | g6523730 | 0 | Human DNA sequence from clone RP3-351K20 on chromosome | DU145 |
| 207 | 475819.14 | g7159799 | 1.00E−153 | dJ351K20.1.1 (novel C3HC4 type Zinc finger (RING finger) | DU145 |
| 208 | 241384.3 | g179400 | 0 | Human beta-D-galactosidase mRNA, complete cds. | PC3 |
| 209 | 3428.1 | g6006046 | 0 | Homo sapiens 2q35 BAC RPCI11-1064L18 (Roswell Park Cancer | DU145 |
| 210 | 244200.1 | g2292903 | 0 | Human GalNAc-T1 gene, 3′UTR. | DU145 |
| 211 | 412484.3 | | | Incyte Unique | PC3 |
| 212 | 412484.8 | | | Incyte Unique | PC3 |
| 213 | 402187.16 | g3811348 | 0 | Human cytosolic phospholipase A2 beta (cPLA2 beta) precursor RNA, complete | DU145 |
| | | | | sequence. | |
| 214 | 903091.31 | g1255988 | 0 | Human dystrobrevin-delta mRNA, complete cds. | DU145 |
| 215 | 903091.33c | g1255992 | 0 | Human dystrobrevin-gamma mRNA, complete cds. | PC3 |
| 216 | 903091.16 | g1256012 | 0 | Human dystrobrevin-beta mRNA, complete cds. | DU145 |
| 217 | 228447.29c | g338442 | 0 | Human general beta-spectrin (SPTBN1) mRNA, complete cds. | DU145 |
| 218 | 475473.1 | g437000 | 0 | Human microtubule-associated protein 1B (MAP1B) gene, complete cds. | DU145 |
| 219 | 354430.4 | g1665822 | 0 | Human mRNA for KIAA0280 gene, partial cds. | DU145 |
| 220 | 468221.12c | g2895078 | 0 | Human tumor protein D53 (TPD52L1) mRNA, partial cds. | DU145 |
| 221 | 468221.13 | g1469919 | 0 | Human D53 (hD53) mRNA, complete cds. | DU145 |
| 222 | 399187.1c | g576780 | 5.00E−20 | Human cyclin F mRNA, complete cds. | DU145 |
| 223 | 903338.12 | g181528 | 0 | Human defensin 1 protein mRNA, complete cds. | DU145 |
| 224 | 208529.1 | | | Incyte Unique | PC3 |
| 225 | 1040667.52 | g3882166 | 0 | Human mRNA for KIAA0723 protein, complete cds. | DU145 |
| 226 | 147665.1 | g4512267 | 5.00E−19 | Human DNA for Ig heavy-chain variable region, complete sequence, 1 of 5. | DU145 |
| 227 | 218524.4 | g559053 | 0 | Human interleukin 8 receptor beta (IL8RB) mRNA, complete cds. | DU145 |
| 228 | 346673.1 | g4218433 | 1.00E−47 | Human chromosome 22 CpG island DNA, genomic Mse1 fragment, clone | PC3 & DU14 |
| | | | | 22CGIB49B9, complete read. | |
| 229 | 58775.1 | | | Incyte Unique | DU145 |
| 230 | 197086.1 | g1881565 | 0 | Human cosmid g1572c101, complete sequence. | DU145 |
| 231 | 348143.7 | g1381163 | 0 | Human huntingtin interacting protein (HIP2) mRNA, complete cds. | DU145 |
| 232 | 239552.3c | g28976 | 0 | Human mRNA for azurocidin. | DU145 |
| 233 | 233003.6 | | | Incyte Unique | PC3 |
| 234 | 233003.2 | | | Incyte Unique | PC3 |
| 235 | 217860.1 | g4589637 | 0 | Human mRNA for KIAA0997 protein, complete cds. | DU145 |
| 236 | 216189.2 | g1580723 | 0 | Human mRNA for Tob, complete cds. | PC3 & DU14 |
| 237 | 343692.15c | g5733823 | 0 | Human ubiquilin mRNA, complete cds. | PC3 & DU14 |
| 238 | 382906.16 | g180142 | 0 | Human CD53 glycoprotein mRNA, complete cds. | DU145 |
| 239 | 482325.15 | g3043649 | 0 | Human mRNA for KIAA0563 protein, complete cds. | PC3 |
| 240 | 64851.1 | | | Incyte Unique | DU145 |
| 241 | 346016.5 | g4033734 | 0 | Human spliceosomal protein SAP 155 mRNA, complete cds. | DU145 |
| 242 | 346016.6 | g4033734 | 0 | Human spliceosomal protein SAP 155 mRNA, complete cds. | DU145 |
| 243 | 222222.1 | | | Incyte Unique | DU145 |
| 244 | 413835.5 | g2257985 | 0 | Human kruppel-related zinc finger protein hcKrox mRNA, complete cds. | PC3 |
| 245 | 978273.4 | g567834 | 2.00E−13 | Human (clone HG52) Z-crystallin/quinone reductase (CRYZ) gene sequence. | DU145 |
| 246 | 474673.1 | g687592 | 0 | Human p190-B (p190-B) mRNA, complete cds. | PC3 |
| 247 | 480286.1 | g510989 | 0 | Human genes for histones H2B.1 and H2A. | DU145 |
| 248 | 402640.1 | | | Incyte Unique | DU145 |
| 249 | 232218.1 | g473629 | 1.00E−64 | Human (clone 1NIB-138) normalized cDNA library sequence. | PC3 |
| 250 | 981919.1c | | | | PC3 |
| 251 | 229369.1 | g3169209 | 0 | Homo sapiens BAC clone CTA-300E22 from 7q21-q31.1, complete | PC3 |
| 252 | 253946.17 | g186353 | 0 | Human membrane glycoprotein gp130 mRNA, complete cds. | PC3 & DU14 |
| 253 | 13550.1 | | | Incyte Unique | DU145 |
| 254 | 997704.1 | g5926684 | 5.00E−13 | Human genomic DNA, chromosome 3p21.3, clone: 301 to 308, anti-oncogene | PC3 |
| | | | | region, section 5/5. | |
| 255 | 385608.45 | g2827202 | 0 | Human general transcription factor 2-I (GTF2I) mRNA, alternatively spliced | PC3 |
| | | | | product, complete cds. | |
| 256 | 385608.25c | g2687639 | 0 | Human general transcription factor 2-I pseudogene 1 (GTF2IP1) mRNA. | PC3 |
| 257 | 385608.3 | g2415381 | 0 | Human TFII-I protein (TFII-I) mRNA, complete cds. | PC3 |
| 258 | 78434.1 | g571295 | 0 | Human CRFB4 gene, partial cds. | DU145 |
| 259 | 243134.1 | g5678818 | 1.00E−08 | Human FRG1 (FRG1) gene, complete cds; 5S ribosomal RNA gene, complete | DU145 |
| | | | | sequence; TUB4q and TIG2 pseudogenes, complete sequence. | |
| 260 | 196959.4c | g1617112 | 0 | Human Na+-D-glucose cotransport regulator gene. | PC3 |
| 261 | 82168.5 | g6175872 | 0 | Human toll-like receptor 4 (TLR4) gene, TLR4A allele, complete cds. | PC3 |
| 262 | 4360.1 | g7023028 | 0 | Homo sapiens cDNA FLJ10785 fis, clone NT2RP4000457, weakly | DU145 |
| 263 | 412661.2 | g415818 | 0 | Human mki67a mRNA (long type) for antigen of monoclonal antibody Ki-67. | DU145 |
| 264 | 206310.2 | | | Incyte Unique | PC3 |
| 265 | 346599.14c | g178848 | 0 | Human apolipoprotein E mRNA, complete cds. | DU145 |
| 266 | 385608.47 | g2827202 | 0 | Human general transcription factor 2-I (GTF2I) mRNA, alternatively spliced | PC3 |
| | | | | product, complete cds. | |
| 267 | 385608.2 | g2827206 | 0 | Human general transcription factor 2-I (GTF2I) mRNA, alternatively spliced | PC3 |
| | | | | product, complete cds. | |
| 268 | 335202.1 | | | Incyte Unique | PC3 |
| 269 | 978402.3 | | | Incyte Unique | DU145 |
| 270 | 232146.1 | | | Incyte Unique | PC3 |
| 271 | 25757.1 | g5923890 | 0 | Human cyclophilin-related protein (NKTR) gene, complete cds. | DU145 |
| 272 | 206860.2 | | | Incyte Unique | PC3 |
| 273 | 239797.3 | g2909843 | 0 | Human prostate stem cell antigen (PSCA) mRNA, complete cds. | PC3 |
| 274 | 441328.12 | g4102966 | 0 | Human pre-mRNA splicing SR protein rA4 mRNA, partial cds. | PC3 |
| 275 | 113975.1 | g4827314 | 0 | Homo sapiens BAC clone RP11-365F8 from 7q31.1-q31.2, complete | PC3 |
| 276 | 427554.6 | | | Incyte Unique | DU145 |
| 277 | 360130.31c | g4099608 | 0 | Human cell division control-related protein 2b (hcdcrel2b) mRNA, complete cds. | DU145 |
| 278 | 82154.23 | | | Incyte Unique | PC3 |
| 279 | 82154.24 | | | Incyte Unique | PC3 |
| 280 | 1137293.16 | g3341991 | 1.00E−49 | Human histone macroH2A1.2 mRNA, complete cds. | PC3 |
| 281 | 994468.3 | | | Incyte Unique | PC3 |
| 282 | 994532.1 | | | Incyte Unique | PC3 |
| 283 | 90710.1 | g2342595 | 0 | Human DNA sequence from cosmid U221F2 on chromosome X. | PC3 & DU14 |
| 284 | 304359.1c | | | | PC3 & DU14 |
| 285 | 12402.1 | | | Incyte Unique | DU145 |
| 286 | 92743.1 | | | Incyte Unique | PC3 |
| 287 | 18513.1 | g6706246 | 0 | Human DNA sequence from clone RP3-393D12 on chromosome | PC3 |
| 288 | 477387.7 | g1036447 | 6.00E−72 | Human CpG island DNA genomic Msel fragment, clone 96f6, forward read | PC3 |
| | | | | cpg96f6.ftla. | |
| 289 | 350440.14c | g190096 | 0 | Human plasma membrane calcium-pumping ATPase (PMCA4) mRNA, complete | PC3 & DU14 |
| 290 | 350440.15 | g179162 | 0 | Human plasma membrane calcium ATPase (hPMCA4) mRNA, complete cds. | PC3 & DU14 |
| 291 | 992455.56c | g6048967 | 0 | Human clone H14 unknown mRNA. | DU145 |
| 292 | 997395.4 | g3483689 | 0 | Human full length insert cDNA clone ZD61F11. | PC3 |
| 293 | 17821.1 | | | Incyte Unique | PC3 |
| 294 | 201436.4c | g6093233 | 0 | Human mRNA; cDNA DKFZp566G1424 (from clone DKFZp566G1424). | PC3 |
| 295 | 201436.3 | g6093233 | 0 | Human mRNA; cDNA DKFZp566G1424 (from clone DKFZp566G1424). | PC3 |
| 296 | 198947.1 | | | Incyte Unique | DU145 |
| 297 | 1135407.1c | | | | DU145 |
| 298 | 200046.1 | g4156141 | 0 | Homo sapiens BAC clone RP11-436H22 from 2, complete sequence. | DU145 |
| 299 | 981489.1 | | | Incyte Unique | DU145 |
| 300 | 19362.1 | | | Incyte Unique | PC3 |
| 301 | 217116.1 | | | Incyte Unique | PC3 |
| 302 | 330530.1 | | | Incyte Unique | PC3 |
| 303 | 401213.1 | g598644 | 1.00E−57 | Human HepG2 partial cDNA, clone hmd2d12m5. | DU145 |
| 304 | 400280.3 | g4514553 | 0 | Human mRNA forRod1, complete cds. | PC3 |
| 305 | 17320.1 | g2736289 | 0 | Human hMed7 (MED7) mRNA, complete cds. | DU145 |
| 306 | 406182.1c | | | | PC3 |
| 307 | 244603.1 | g6065863 | 0 | Human DNA sequence from clone 1018E9 on chromosome | PC3 |
| 308 | 107405.1 | | | Incyte Unique | PC3 |
| 309 | 337024.4 | g299702 | 0 | 75 kda infertility-related sperm protein [Human, testis, mRNA Partial, 2427 nt]. | DU145 |
| 310 | 337024.3 | g299702 | 0 | 75 kda infertility-related sperm protein [Human, testis, mRNA Partial, 2427 nt]. | DU145 |
| 311 | 481848.1c | g2865218 | 0 | Human integrin binding protein Del-1 (Del1) mRNA, complete cds. | PC3 & DU14 |
| 312 | 208723.1 | | | Incyte Unique | DU145 |
| 313 | 64612.1 | | | Incyte Unique | PC3 |
| 314 | 978402.1 | | | Incyte Unique | DU145 |
| 315 | 453369.8 | g6642986 | 0 | Human aminopeptidase PILS (APPILS) mRNA, complete cds. | DU145 |
| 316 | 27240.1 | g5649181 | 1.00E−155 | Homo sapiens 3q26.2-27 BAC RPCI11-469J4 (Roswell Park Cancer | DU145 |
| 317 | 401290.1c | | | | DU145 |
| 318 | 481847.1 | g2865220 | 0 | Human integrin binding protein Del-1, Z20 splice variant, (Del1) mRNA, partial | PC3 & DU14 |
| 319 | 235636.1 | g2865218 | 1.00E−19 | Human integrin binding protein Del-1 (Del1) mRNA, complete cds. | PC3 & DU14 |
| 320 | 994057.7 | g37137 | 3.00E−79 | Human mRNA for thrombospondin. | DU145 |
| 321 | 405559.1 | g897824 | 1.70E−17 | AHNAK gene product | DU145 |
| 322 | 16760.1 | | | Incyte Unique | DU145 |
| 323 | 198522.1 | | | Incyte Unique | PC3 |
| 324 | 19366.1 | | | Incyte Unique | DU145 |
| 325 | 002679.7c | | | | PC3 |
| 326 | 208276.1 | | | Incyte Unique | DU145 |
| 327 | 21552.1 | g3688074 | 0 | Homo sapiens chromosome 5, BAC clone 34j15 (LBNL H169), | PC3 |
| 328 | 198087.1 | g4160665 | 0 | Human cDNA for NG,NG-dimethylarginine dimethylaminohydrolase, complete | PC3 |
| 329 | 903269.4 | g3661609 | 0 | Human splicing factor Prp8 mRNA, complete cds. | PC3 |
| 330 | 351166.1 | | | Incyte Unique | DU145 |
| 331 | 344713.3 | g6472600 | 0.29 | unconventional myosin heavy chain [Chara corallina] | DU145 |
| 332 | 167920.1 | g2636170 | 1.7 | similar to antibiotic resistance protein [Bacillus subtilis] | DU145 |
| 333 | 433569.1 | g791003 | 0 | Human ARSE gene, complete cds. | PC3 |
| 334 | 406365.1 | | | Incyte Unique | PC3 |
| 335 | 348121.9 | g1136417 | 0 | Human mRNA for KIAA0179 gene, partial cds. | PC3 |
| 336 | 363585.1c | | | | PC3 |
| 337 | 408116.1 | | | Incyte Unique | PC3 |
| 338 | 339737.1c | | | | DU145 |
| 339 | 978146.1 | | | Incyte Unique | PC3 |
| 340 | 186012.1 | | | Incyte Unique | DU145 |
| 341 | 405041.1 | g3929221 | 2.40E−102 | TRF1-interacting ankyrin-related ADP-ribose polymerase | DU145 |
| 342 | 474266.2 | g3929218 | 7.00E−28 | Human TRF1-interacting ankyrin-related ADP-ribose polymerase mRNA, | DU145 |
| | | | | complete cds. | |
| 343 | 401530.2 | g6731234 | 4.00E−75 | Human myoferlin (MYOF) mRNA, complete cds. | DU145 |
| 344 | 234729.11 | g6330496 | 0 | Human mRNA for KIAA1207 protein, partial cds. | DU145 |
| 345 | 195199.1 | g6329818 | 0 | Human mRNA for KIAA1131 protein, partial cds. | DU145 |
| 346 | 368731.1 | | | Incyte Unique | PC3 |
| 347 | 372313.6 | g885977 | 0 | Human organic anion transporting polypeptide (OATP) mRNA, complete cds. | PC3 |
| 348 | 256871.2 | g3861482 | 2.00E−86 | Human chromosome 3, olfactory receptor pseudogene cluster 1, complete | DU145 |
| | | | | sequence, and myosin light chain kinase (MLCK) pseudogene, partial sequence. | |
| 349 | 256871.16c | g896064 | 0 | Human protein immuno-reactive with anti-PTH polyclonal antibodies mRNA, | DU145 |
| | | | | partial cds. | |

FGF treated, upregulated

| | | | | | |
|---|---|---|---|---|---|
| 350 | 22485.15 | g34349 | 0 | Human LFA-3 mRNA for glycosylated surface protein. | DU145 |
| 351 | 22485.1 | g34346 | 0 | Human mRNA for lymphocyte function associated antigen-3 (LFA-3). | DU145 |
| 352 | 26410.1 | g2381480 | 0 | Human mRNA for epiregulin, complete cds. | DU145 |
| 353 | 215720.1 | | | Incyte Unique | DU145 |
| 354 | 472165.22 | g662993 | 0 | Human mRNA encoding GPI-anchored protein p137. | DU145 |
| 355 | 206580.1 | | | Incyte Unique | DU145 |
| 356 | 344775.3 | g3822553 | 0 | nuclear calmodulin-binding protein [Gallus gallus] | DU145 |
| 357 | 334668.1 | | | Incyte Unique | DU145 |
| 358 | 416874.3 | g340159 | 0 | Human pro-urokinase mRNA, complete cds. | DU145 |
| 359 | 427964.2 | g31462 | 0 | Human fra-1 mRNA. | DU145 |
| 360 | 234537.3c | g23896 | 0 | Human placental cDNA coding for 5′nucleotidase (EC 3.1.3.5). | DU145 |
| 361 | 31760.1 | | | Incyte Unique | DU145 |
| 362 | 336953.7 | g1813423 | 0 | Human mRNA for HCS, complete cds. | DU145 |
| 363 | 444771.2 | g31107 | 0 | Human mRNA for elongation factor 2. | DU145 |
| 364 | 449173.16 | g189499 | 0 | Human p62 mRNA, complete cds. | DU145 |
| 365 | 1523.1 | | | Incyte Unique | DU145 |
| 366 | 239097.1 | | | Incyte Unique | DU145 |
| 367 | 252747.27 | g6330689 | 0 | Human mRNA for KIAA1228 protein, partial cds. | DU145 |
| 368 | 482490.11 | g6650213 | 8.00E−69 | Human RAN binding protein 16 mRNA, complete cds. | DU145 |
| 369 | 1000084.27 | g3719220 | 0 | Human vascular endothelial growth factor mRNA, complete cds. | DU145 |

TGFβ treated, downregulated

| | | | | | |
|---|---|---|---|---|---|
| 263 | 412661.2 | g415818 | 0 | Human mki67a mRNA (long type) for antigen of monoclonal antibody Ki-67. | DU145 |
| 316 | 27240.1 | g5649181 | 1.00E−155 | Homo sapiens 3q26.2-27 BAC RPCI11-469J4 (Roswell Park Cancer | DU145 |
| 370 | 205607.5 | g987947 | 0 | Human mRNA for phosphatidylinositol 3-kinase. | DU145 |
| 371 | 1089426.1 | g886947 | 0.54 | orf3 [Saccharomyces cerevisiae] | DU145 |
| 372 | 335186.2 | g3929751 | 2.00E−11 | Human SYBL1 gene. | DU145 |
| 373 | 357276.8 | g2232030 | 0 | Human inositol polyphosphate 4-phosphatase type I-beta mRNA, complete cds. | DU145 |
| 374 | 474724.5 | g507212 | 0 | Human serine kinase mRNA, complete cds. | DU145 |
| 375 | 230889.3 | g5817126 | 0 | Human mRNA; cDNA DKFZp586P1622 (from clone DKFZp586P1622). | DU145 |
| 376 | 903909.1 | | | Incyte Unique | DU145 |
| 377 | 229298.1 | g4500162 | 0 | Human mRNA; cDNA DKFZp586D0918 (from clone DKFZp586D0918). | DU145 |
| 378 | 229298.2 | g4500162 | 0 | Human mRNA; cDNA DKFZp586D0918 (from clone DKFZp586D0918). | DU145 |
| 379 | 110678.1 | g4371263 | 0 | Homo sapiens chromosome 16 clone 66H6, complete sequence. | DU145 |
| 380 | 239093.1 | | | Incyte Unique | DU145 |
| 381 | 237963.11c | g3873560 | 0 | Human mRNA for C17orf1 protein. | DU145 |
| 382 | 237963.8 | g3873560 | 0 | Human mRNA for C17orf1 protein. | DU145 |
| 383 | 400135.1 | | | Incyte Unique | DU145 |
| 384 | 344398.2 | g4500170 | 0 | Human mRNA; cDNA DKFZp586K1318 (from clone DKFZp586K1318). | DU145 |
| 385 | 1086647.1 | | | Incyte Unique | DU145 |
| 386 | 1682.1 | | | Incyte Unique | DU145 |
| 387 | 010190.1c | | | | DU145 |
| 388 | 205311.1 | g5931461 | e−149 | Homo sapiens clone NH0309N08, complete sequence. | DU145 |
| 389 | 22429.7 | g457372 | e−129 | dihydroxypolyprenylbenzoate methyltransferase [Rattus | DU145 |
| 390 | 59379.1 | | | Incyte Unique | DU145 |
| 391 | 236253.1 | g6808164 | 4.00E−83 | Human mRNA; cDNA DKFZp761A052 (from clone DKFZp761A052). | DU145 |
| 392 | 331033.1 | g286012 | 0 | Human mRNA for KIAA0008 gene, complete cds. | DU145 |
| 393 | 345533.8c | g2385368 | 0 | Human mRNA for Rer1 protein. | DU145 |
| 394 | 238342.1 | g3483461 | 0 | Human full length insert cDNA clone ZA70C11. | DU145 |
| 395 | 28936.1 | g3282164 | 0 | Homo sapiens chromosome 5, BAC clone 282B7 (LBNL H192), | DU145 |
| 396 | 347865.5 | g6807697 | 2.00E−40 | Human mRNA; cDNA DKFZp434A1014 (from clone DKFZp434A1014); partial | DU145 |
| 397 | 347865.4 | g6807697 | 1.00E−89 | Human mRNA; cDNA DKFZp434A1014 (from clone DKFZp434A1014); partial | DU145 |
| 398 | 40057.2 | g285946 | 0 | Human mRNA for KIAA0105 gene, complete cds. | DU145 |
| 399 | 997301.6 | | | Incyte Unique | DU145 |
| 400 | 12235.1 | | | Incyte Unique | DU145 |
| 401 | 245496.7 | g7298512 | 4.00E−54 | CG10641 gene product [Drosophila melanogaster] | DU145 |
| 402 | 983262.3c | | | | DU145 |
| 403 | 998084.1 | g3483880 | 0 | Human full length insert cDNA clone ZE07G05. | DU145 |
| 404 | 238071.2 | g5926700 | 0 | Human genomic DNA, chromosome 6p21.3, HLA Class I region, section 12/20. | DU145 |
| 405 | 103930.1 | | | Incyte Unique | DU145 |
| 406 | 254068.1 | g3095056 | 1.00E−08 | Human platelet-activating factor acetylhydrolase gene, promoter region and exon | DU145 |
| 407 | 221812.1 | g7019862 | 0 | Homo sapiens cDNA FLJ20033 fis, clone COL00106. | DU145 |
| 408 | 240129.1 | | | Incyte Unique | DU145 |
| 409 | 230297.1c | | | | DU145 |
| 410 | 347796.7 | g710405 | 2.8 | 35 kDa protein [Bartonella henselae] | DU145 |
| 411 | 411474.17 | g3043687 | 0 | Human mRNA for KIAA0582 protein, partial cds. | DU145 |
| 412 | 027434.1c | | | | DU145 |
| 413 | 979488.1c | | | | DU145 |
| 414 | 213988.1 | g7263867 | 1.00E−134 | Human chromosome 14 DNA sequence *** IN PROGRESS *** BAC | DU145 |

TGFβ treated, upregulated

| | | | | | |
|---|---|---|---|---|---|
| 321 | 405559.1 | g897824 | 1.70E−17 | AHNAK gene product | DU145 |
| 322 | 16760.1 | | | Incyte Unique | DU145 |
| 415 | 263336.62 | g187530 | 0 | Human metallothionein-II pseudogene (mt-IIps). | DU145 |
| 416 | 153860.6 | g4508112 | 0 | Homo sapiens clone RG161A02, complete sequence. | DU145 |
| 417 | 154178.1 | | | Incyte Unique | DU145 |
| 418 | 337888.3 | | | Incyte Unique | DU145 |
| 419 | 240009.2c | | | | DU145 |
| 420 | 160011.1 | | | Incyte Unique | DU145 |
| 421 | 332919.4 | g793840 | 0 | Human mRNA for cytokine inducible nuclear protein. | DU145 |
| 422 | 6233.1 | | | Incyte Unique | DU145 |
| 423 | 245532.17c | g495286 | 0 | Human melanoma differentiation associated (mda-6) mRNA, complete cds. | DU145 |
| 424 | 205486.1 | | | Incyte Unique | DU145 |
| 425 | 987927.13 | g458227 | 0 | Human extracellular protein (S1-5) mRNA, complete cds. | DU145 |
| 426 | 25423.3 | | | Incyte Unique | DU145 |
| 427 | 1091415.2 | g5231136 | 0 | Human angiopoietin-related protein mRNA, complete cds. | DU145 |
| 428 | 1091415.16c | g5231136 | 0 | Human angiopoietin-related protein mRNA, complete cds. | DU145 |
| 429 | 230058.2 | g4154282 | 0 | Human xenotropic and polytropic murine leukemia virus receptor (X3) mRNA, | DU145 |
| | | | | complete cds. | |
| 430 | 444648.9 | g187542 | 0 | Human metallothionein (MT)I-F gene, complete cds. | DU145 |
| 431 | 464689.22 | g4808600 | 0 | Human stearoyl-CoA desaturase (SCD) mRNA, complete cds. | DU145 |
| 432 | 464689.15 | g4808600 | 0 | Human stearoyl-CoA desaturase (SCD) mRNA, complete cds. | DU145 |
| 433 | 334809.3c | g36510 | 0 | Human sno oncogene mRNA for snoN protein, ski-related. | DU145 |
| 434 | 351241.1 | g2935483 | 4.00E−56 | Human minisatellite cebl repeat region. | DU145 |
| 435 | 482336.11 | g34067 | 0 | Human mRNA fragment for mesothelial type II keratin K7. | DU145 |
| 436 | 482336.31 | g34067 | 0 | Human mRNA fragment for mesothelial type II keratin K7. | DU145 |

TGFα treated, downregulated

| | | | | | |
|---|---|---|---|---|---|
| 43 | 60671.7 | g3043675 | 0 | Human mRNA for KIAA0576 protein, partial cds. | PC3 |
| 437 | 197538.2 | g942584 | 0 | Human RAR-responsive (TIG1) mRNA, complete cds. | PC3 |
| 438 | 197538.8 | g6066619 | 7.00E−06 | latexin [Rattus norvegicus] | PC3 |
| 439 | 232048.14 | g37638 | 0 | Human mRNA for vascular anticoagulant-beta (VAC-beta). | PC3 |
| 440 | 1092381.1 | g6634028 | 0 | Human mRNA for KIAA0399 protein, partial cds. | PC3 |
| 441 | 903804.1 | g5815499 | 0 | Homo sapiens 12p12-27.2-31.7 BAC RPCI11-392P7 (Roswell Park | PC3 |
| 442 | 210945.6 | g532500 | 0 | Human mRNA for FK506-binding protein 12 kDa (hFKBP-12) homologue, | PC3 |
| | | | | complete cds. | |
| 443 | 210945.3c | g532500 | 0 | Human mRNA for FK506-binding protein 12 kDa (hFKBP-12) homologue, | PC3 |
| | | | | complete cds. | |
| 444 | 403448.2 | g3037018 | 3.8 | NADH dehydrogenase subunit 5 [Bodo saltans] | PC3 |
| 445 | 238263.2 | | | Incyte Unique | PC3 |
| 446 | 146382.22 | g2463541 | 0 | Human mRNA for inositol 1,4,5-trisphosphate 3-kinase isoenzyme, partial cds. | PC3 |
| 447 | 146382.25 | g2463541 | 0 | Human mRNA for inositol 1,4,5-trisphosphate 3-kinase isoenzyme, partial cds. | PC3 |
| 448 | 345705.7 | g3047307 | 0 | Human sarcosin mRNA, complete cds. | PC3 |
| 449 | 198212.1 | g4416529 | 0 | Human skeletal muscle LIM-protein FHL3 mRNA, complete cds. | PC3 |
| 450 | 198212.6 | g4416529 | 0 | Human skeletal muscle LIM-protein FHL3 mRNA, complete cds. | PC3 |
| 451 | 900031.8 | g2094872 | 0 | Human DAP-kinase mRNA. | PC3 |
| 452 | 900031.4 | g2094872 | 0 | Human DAP-kinase mRNA. | PC3 |
| 453 | 475365.4 | | | Incyte Unique | PC3 |
| 454 | 222810.1 | g182662 | 0 | Human N-formylpeptide receptor (fMLP-R98) mRNA, complete cds. | PC3 |
| 455 | 1084493.6 | g1150990 | 0 | Human receptor tyrosine kinase Flt4 (short form) mRNA, complete cds. | PC3 |
| 456 | 979005.2 | g4827155 | 3 | bcsCI [Acetobacter xylinus] | PC3 |
| 457 | 346686.23 | g183046 | 0 | Human granulocyte colony-stimulating factor receptor (G-CSFR-1) mRNA, | PC3 |
| | | | | complete cds. | |
| 458 | 234568.25 | g1469204 | 0 | Human mRNA for KIAA0141 gene, complete cds. | PC3 |
| 459 | 234568.17 | g1469204 | 0 | Human mRNA for KIAA0141 gene, complete cds. | PC3 |
| 460 | 978276.1c | | | | PC3 |
| 461 | 26968.1 | g2253289 | 3.00E−09 | Human endothelin A receptor gene, 5' flanking region and exon 1. | PC3 |
| 462 | 243103.24 | g562105 | 0 | Human (dlk) mRNA, complete cds. | PC3 |
| 463 | 469883.1 | g1663566 | 0 | Human semaphorin (CD100) mRNA, complete cds. | PC3 |
| 464 | 903565.14c | g2330552 | 0 | Human mRNA for PACE4A-II, complete cds. | PC3 |
| 465 | 227932.2 | g2264346 | 1.00E−141 | GOK [Homo sapiens] | PC3 |
| 466 | 903691.6 | g439295 | 0 | Human garp gene mRNA, complete cds. | PC3 |
| 467 | 012995.19c | g6682360 | 0 | Human talin mRNA, complete cds. | PC3 |
| 468 | 407938.5 | g2765321 | 0 | Human mRNA for RB18A protein. | PC3 |
| 469 | 233778.1 | g487808 | 0 | Human cell surface protein (NKG7) mRNA, complete cds. | PC3 |
| 470 | 474630.19 | g33910 | 0 | Human mRNA for integrin beta(4)subunit. | PC3 |
| 471 | 217319.7 | g1033874 | 7.00E−11 | Human CpG island DNA genomic Msel fragment, clone 53c10, reverse read | PC3 |
| | | | | cpg53c10.rtlb. | |
| 472 | 1092445.1 | g5915897 | 0 | Human zinc finger protein 42 (ZNF42) mRNA, alternate transcript, complete cds. | PC3 |
| 473 | 199433.3 | g4323621 | 0 | Human intracellular chloride channel CLIC3 (CLIC3) mRNA, complete cds. | PC3 |
| 474 | 228860.6 | g2865608 | 0 | Human homogentisate 1,2-dioxygenase (AKU) mRNA, complete cds. | PC3 |
| 475 | 228860.4c | g2130646 | 0 | Human homogentisate 1,2-dioxygenase gene, complete cds. | PC3 |
| 476 | 410688.3 | g1405359 | 9.00E−89 | Human fetal brain (239FB) mRNA, from the WAGR region, complete cds. | PC3 |
| 477 | 347005.5 | g35787 | 0 | Human HPTP beta mRNA for protein tyrosine phosphatase beta. | PC3 |
| 478 | 334621.13 | g3599961 | 5.00E−90 | Human h-bcs1 (BCS1) mRNA, nuclear gene encoding mitochondrial protein, | PC3 |
| | | | | complete cds. | |
| 479 | 28180.1 | | | Incyte Unique | PC3 |
| 480 | 252570.6c | g3820529 | 7.2 | protein kinase homolog; AbiBL11 [Bacillus licheniformis] | PC3 |
| 481 | 466402.116 | g435059 | 0 | Human Golli-mbp gene, complete cds. | PC3 |
| 482 | 1096160.26c | g561542 | 0 | Human protein kinase (zpk) mRNA, complete cds. | PC3 |
| 483 | 899612.2 | g4884371 | 0 | Human mRNA; cDNA DKFZp586A0522 (from clone DKFZp586A0522); partial | PC3 |
| 484 | 254107.1 | g220126 | 0 | Human gene for thrombomodulin precursor, complete cds. | PC3 |
| 485 | 208328.1 | g2546963 | 0 | Human mRNA for diubiquitin. | PC3 |
| 486 | 130157.2 | g5870324 | 1.00E−61 | supported by human EST AA331940 (NID: g1984182), mouse EST AA387866 | PC3 |
| | | | | (NID: 2040812), and Genscan [Homo sapiens] | |
| 487 | 985824.2c | | | | PC3 |
| 488 | 233089.1 | g7242976 | 0 | Homo sapiens mRNA for KIAA1311 protein, partial cds. | PC3 |
| 489 | 336256.1 | g963053 | 0 | Human mRNA for membrane-type matrix metalloprotease 1. | PC3 |
| 490 | 979616.2 | g563140 | 2.4 | cytochrome c oxidase subunit 1 [Trypanoplasma borreli] | PC3 |
| 491 | 351432.3 | g1809029 | 0 | Human AE2 anion exchanger (SLC4A2) mRNA, complete cds. | PC3 |
| 492 | 83495.1 | | | Incyte Unique | PC3 |
| 493 | 332595.1 | g2979421 | 0 | Human mRNA for PCDH7 (BH-Pcdh)c, complete cds. | PC3 |
| 494 | 481251.3 | g5917667 | 0 | Human cysteine-rich hydrophobic 2 CHIC2 mRNA, complete cds. | PC3 |
| 495 | 25612.1 | | | Incyte Unique | PC3 |
| 496 | 96700.1 | | | Incyte Unique | PC3 |
| 497 | 230048.1 | | | Incyte Unique | PC3 |
| 498 | 073621.3c | g6330384 | 0 | Human mRNA for KIAA1197 protein, partial cds. | PC3 |
| 499 | 344582.19 | g4106877 | 0 | Human decoy receptor 3 (DcR3) mRNA, complete cds. | PC3 |
| 500 | 997526.4 | g5102629 | 0 | Novel Human gene mapping to chomosome 22. | PC3 |
| 501 | 997526.1 | g3483012 | 0 | Human mRNA for HMGBCG protein. | PC3 |

[0178] TABLE 2

| SEQ | TEMPLATE | | | | | |
|---|---|---|---|---|---|---|
| ID NO | ID | START | STOP | FRAME | Pfam Description | E-Value |
| 3 | 977955.7 | 984 | 1133 | forward 3 | Phorbol esters/diacylglycerol binding domain (C1 domain) | 2.40E−21 |
| 3 | 977955.7 | 1440 | 1796 | forward 3 | PH domain | 7.10E−12 |
| 3 | 977955.7 | 1920 | 2690 | forward 3 | Eukaryotic protein kinase domain | 5.70E−76 |
| 4 | 350754.2 | 857 | 1123 | forward 2 | Transglutaminase-like superfamily | 1.40E−46 |
| 4 | 350754.2 | 1457 | 2119 | forward 2 | Transglutaminase family | 3.20E−50 |
| 4 | 350754.2 | 56 | 415 | forward 2 | Transglutaminase family | 2.20E−63 |
| 5 | 235191.4 | 180 | 617 | forward 3 | Ubiquitin-conjugating enzyme | 3.30E−57 |
| 7 | 1099593.2 | 325 | 447 | forward 1 | Armadillo/beta-catenin-like repeats | 2.20E−07 |
| 11 | 347915.14 | 1585 | 1911 | forward 1 | PH domain | 2.00E−14 |
| 11 | 347915.14 | 2191 | 2436 | forward 1 | Src homology domain 2 | 1.90E−21 |
| 12 | 997395.1 | 2027 | 2143 | forward 2 | WD domain, G-beta repeat | 2.10E−05 |
| 16 | 404155.2 | 2133 | 2417 | forward 3 | Cyclic nucleotide-binding domain | 6.20E−30 |
| 16 | 404155.2 | 2587 | 3207 | forward 1 | Eukaryotic protein kinase domain | 3.30E−71 |
| 16 | 404155.2 | 2505 | 2669 | forward 3 | Eukaryotic protein kinase domain | 2.20E−06 |
| 16 | 404155.2 | 3208 | 3306 | forward 1 | Protein kinase C terminal domain | 1.30E−04 |
| 19 | 345860.21 | 459 | 1109 | forward 3 | Papain family cysteine protease | 2.80E−133 |
| 20 | 199101.1 | 612 | 1172 | forward 3 | Glycosyl transferases | 9.60E−18 |
| 20 | 199101.1 | 1554 | 1940 | forward 3 | Similarity to lectin domain of ricin beta-chain, 3 copies. | 3.00E−09 |
| 22 | 475146.3 | 197 | 1567 | forward 2 | Hydroxymethylglutaryl-coenzyme A synthase | 0.00E+00 |
| 24 | 255115.2 | 91 | 1605 | forward 1 | UDP-glucoronosyl and UDP-glucosyl transferases | 0.00E+00 |
| 25 | 255115.4 | 121 | 1023 | forward 1 | UDP-glucoronosyl and UDP-glucosyl transferases | 1.70E−177 |
| 25 | 255115.4 | 977 | 1573 | forward 2 | UDP-glucoronosyl and UDP-glucosyl transferases | 2.60E−158 |
| 29 | 978047.1 | 613 | 1287 | forward 1 | alpha/beta hydrolase fold | 1.20E−04 |
| 37 | 399067.1 | 1426 | 1611 | forward 1 | Immunoglobulin domain | 1.50E−08 |
| 37 | 399067.1 | 538 | 609 | forward 1 | Leucine Rich Repeat | 1.40E−04 |
| 37 | 399067.1 | 1219 | 1377 | forward 1 | Leucine rich repeat C-terminal domain | 9.90E−13 |
| 37 | 399067.1 | 199 | 321 | forward 1 | Leucine rich repeat N-terminal domain | 6.70E−04 |
| 41 | 255824.52 | 642 | 1244 | forward 3 | Fructose-bisphosphate aldolase class-I | 5.60E−149 |
| 41 | 255824.52 | 1237 | 1644 | forward 1 | Fructose-bisphosphate aldolase class-I | 7.30E−96 |
| 44 | 376085.9 | 1596 | 1664 | forward 3 | Zinc finger, C2H2 type | 2.10E−05 |
| 45 | 404467.1 | 6 | 764 | forward 3 | 7 transmembrane receptor (Secretin family) | 6.30E−09 |
| 49 | 391406.5 | 2183 | 2299 | forward 2 | WD domain, G-beta repeat | 1.60E−13 |
| 49 | 391406.5 | 1128 | 1244 | forward 3 | WD domain, G-beta repeat | 1.60E−13 |
| 50 | 391406.24 | 349 | 465 | forward 1 | WD domain, G-beta repeat | 1.60E−13 |
| 50 | 391406.24 | 87 | 206 | forward 3 | WD domain, G-beta repeat | 2.10E−07 |
| 51 | 474588.21 | 2263 | 2460 | forward 1 | RNA recognition motif. (a.k.a. RRM, RBD, or RNP domain) | 9.20E−21 |
| 51 | 474588.21 | 1863 | 2075 | forward 3 | RNA recognition motif. (a.k.a. RRM, RBD, or RNP domain) | 6.90E−09 |
| 53 | 246862.9 | 1391 | 1489 | forward 2 | ATP synthase Alpha chain, C terminal | 1.20E−22 |
| 53 | 246862.9 | 1315 | 1401 | forward 1 | ATP synthase Alpha chain, C terminal | 4.10E−20 |
| 53 | 246862.9 | 347 | 1315 | forward 2 | ATP synthase alpha/beta family | 1.10E−87 |
| 53 | 246862.9 | 307 | 1071 | forward 1 | ATP synthase alpha/beta family | 9.60E−10 |
| 54 | 246862.17 | 1428 | 1832 | forward 3 | ATP synthase Alpha chain, C terminal | 4.30E−106 |
| 54 | 246862.17 | 303 | 1427 | forward 3 | ATP synthase alpha/beta family | 1.60E−187 |
| 56 | 236480.3 | 2154 | 2264 | forward 3 | WD domain, G-beta repeat | 7.30E−08 |
| 57 | 314831.5 | 841 | 2037 | forward 1 | Elongation factor Tu family | 6.10E−142 |
| 58 | 391940.1 | 1300 | 2004 | forward 1 | alpha/beta hydrolase fold | 1.70E−31 |
| 59 | 454958.13 | 266 | 799 | forward 2 | Tissue inhibitor of metalloproteinases | 1.80E−141 |
| 61 | 238203.11 | 89 | 3544 | forward 2 | Vinculin family | 9.30E−281 |
| 61 | 238203.11 | 828 | 3182 | forward 3 | Vinculin family | 4.50E−110 |
| 62 | 994057.21 | 277 | 1155 | forward 1 | Ser/Thr protein phosphatase | 6.10E−202 |
| 63 | 346730.5 | 71 | 1300 | forward 2 | Monocarboxylate transporter | 1.10E−48 |
| 66 | 482336.2 | 768 | 1706 | forward 3 | Intermediate filament proteins | 5.50E−167 |
| 67 | 482336.14 | 654 | 1592 | forward 3 | Intermediate filament proteins | 1.30E−167 |
| 69 | 300294.3 | 589 | 1392 | forward 1 | SRP54-type protein | 4.00E−141 |
| 71 | 475028.7 | 203 | 721 | forward 2 | ADP-ribosylation factor family | 8.10E−06 |
| 71 | 475028.7 | 233 | 853 | forward 2 | Ras family | 2.90E−92 |
| 72 | 481223.3 | 430 | 636 | forward 1 | HMG (high mobility group) box | 3.80E−31 |
| 74 | 234340.7 | 1164 | 1412 | forward 3 | Ets-domain | 1.80E−53 |
| 77 | 317586.1 | 471 | 1253 | forward 3 | N-acetyltransferase | 1.40E−208 |
| 86 | 1063057.1 | 153 | 221 | forward 3 | Zinc finger, C2H2 type | 1.60E−06 |
| 87 | 199905.1 | 48 | 200 | forward 3 | Laminin EGF-like (Domains III and V) | 8.90E−13 |
| 90 | 330878.6 | 178 | 2286 | forward 1 | Cullin family | 2.40E−222 |
| 91 | 331793.11 | 175 | 819 | forward 1 | emp24/gp25L/p24 family | 4.50E−55 |
| 97 | 977667.1 | 273 | 1013 | forward 3 | 7 transmembrane receptor (rhodopsin family) | 4.40E−77 |
| 99 | 1136709.5 | 284 | 601 | forward 2 | Vertebrate galactoside-binding lectins | 1.60E−58 |
| 100 | 1136709.6 | 137 | 454 | forward 2 | Vertebrate galactoside-binding lectins | 1.80E−57 |
| 101 | 382293.16 | 756 | 1094 | forward 3 | CUB domain | 4.00E−42 |
| 101 | 382293.16 | 636 | 746 | forward 3 | EGF-like domain | 1.40E−06 |
| 101 | 382293.16 | 1308 | 1496 | forward 3 | Sushi domain (SCR repeat) | 1.20E−12 |
| 101 | 382293.16 | 1545 | 2258 | forward 3 | Trypsin | 3.30E−68 |
| 102 | 382293.15 | 988 | 1326 | forward 1 | CUB domain | 4.00E−42 |
| 102 | 382293.15 | 868 | 978 | forward 1 | EGF-like domain | 1.40E−06 |
| 102 | 382293.15 | 1567 | 1755 | forward 1 | Sushi domain (SCR repeat) | 1.20E−12 |
| 102 | 382293.15 | 1804 | 2517 | forward 1 | Trypsin | 3.30E−68 |
| 104 | 235943.36 | 184 | 531 | forward 1 | SEA domain | 2.40E−29 |
| 105 | 401434.1 | 410 | 604 | forward 2 | DnaJ domain | 9.70E−35 |
| 106 | 234107.2 | 1162 | 1311 | forward 1 | Immunoglobulin domain | 4.60E−08 |
| 106 | 234107.2 | 177 | 422 | forward 3 | Immunoglobulin domain | 2.50E−05 |
| 109 | 441298.14 | 26 | 175 | forward 2 | PHD-finger | 1.40E−11 |
| 113 | 230936.6 | 184 | 996 | forward 1 | Ribosomal RNA adenine dimethylases | 8.10E−32 |
| 116 | 405158.1 | 23 | 121 | forward 2 | Ank repeat | 1.20E−04 |
| 116 | 405158.1 | 756 | 986 | forward 3 | IBR domain | 9.00E−15 |
| 118 | 480187.81 | 305 | 538 | forward 2 | Immunoglobulin domain | 2.40E−08 |
| 119 | 62042.4 | 247 | 492 | forward 1 | Fibronectin type III domain | 1.40E−11 |
| 120 | 1087696.7 | 179 | 769 | forward 2 | short chain dehydrogenase | 9.20E−45 |
| 121 | 259805.28 | 328 | 1083 | forward 1 | Eukaryotic protein kinase domain | 5.20E−100 |
| 121 | 259805.28 | 1141 | 1257 | forward 1 | UBA domain | 6.00E−06 |
| 123 | 986565.15 | 241 | 1533 | forward 1 | Reduced folate carrier | 9.10E−143 |
| 124 | 978378.3 | 361 | 999 | forward 1 | TBC domain | 1.90E−37 |
| 127 | 238635.1 | 123 | 296 | forward 3 | Immunoglobulin domain | 2.60E−09 |
| 128 | 1080496.1 | 1256 | 1324 | forward 2 | Zinc finger, C2H2 type | 9.80E−04 |
| 129 | 351204.2 | 190 | 777 | forward 1 | Trypsin | 5.70E−76 |
| 133 | 474868.2 | 209 | 403 | forward 2 | DnaJ domain | 1.20E−36 |
| 133 | 474868.2 | 866 | 1234 | forward 2 | DnaJ C terminal region | 2.50E−18 |
| 140 | 411296.2 | 1186 | 1923 | forward 1 | Eukaryotic protein kinase domain | 9.90E−73 |
| 140 | 411296.2 | 832 | 1080 | forward 1 | Src homology domain 2 | 2.00E−50 |
| 140 | 411296.2 | 643 | 810 | forward 1 | SH3 domain | 2.70E−25 |
| 150 | 346511.4 | 1129 | 1449 | forward 1 | Nucleotidyltransferase domain | 8.90E−17 |
| 151 | 346511.6 | 1124 | 1444 | forward 2 | Nucleotidyltransferase domain | 8.90E−17 |
| 153 | 234056.5 | 162 | 899 | forward 3 | Transmembrane 4 family | 1.60E−47 |
| 156 | 988653.1 | 1295 | 1369 | forward 2 | Zinc finger, C2H2 type | 1.00E−06 |
| 157 | 470468.26 | 726 | 1472 | forward 3 | Phosphorylase family | 1.20E−04 |
| 161 | 1094412.1 | 298 | 2118 | forward 1 | Hsp70 protein | 0.00E+00 |
| 162 | 1094107.1 | 293 | 2104 | forward 2 | Hsp70 protein | 4.80E−204 |
| 162 | 1094107.1 | 813 | 2066 | forward 3 | Hsp70 protein | 1.30E−31 |
| 164 | 12178.2 | 15 | 248 | forward 3 | E1-E2 ATPase | 1.20E−09 |
| 165 | 100653.3 | 313 | 486 | forward 1 | Helix-loop-helix DNA-binding domain | 3.20E−13 |
| 171 | 331065.2 | 244 | 510 | forward 1 | Caspase recruitment domain | 3.70E−32 |
| 171 | 331065.2 | 1226 | 1507 | forward 2 | ICE-like protease (caspase) p10 domain | 1.60E−50 |
| 171 | 331065.2 | 739 | 1128 | forward 1 | ICE-like protease (caspase) p20 domain | 9.40E−77 |
| 172 | 331065.5 | 180 | 446 | forward 3 | Caspase recruitment domain | 3.70E−32 |
| 172 | 331065.5 | 1143 | 1424 | forward 3 | ICE-like protease (caspase) p10 domain | 1.60E−50 |
| 172 | 331065.5 | 675 | 1064 | forward 3 | ICE-like protease (caspase) p20 domain | 1.50E−81 |
| 173 | 252782.4 | 644 | 793 | forward 2 | F-box domain. | 2.20E−04 |
| 176 | 200163.2 | 468 | 1289 | forward 3 | Cell division protein | 1.90E−119 |
| 178 | 1328237.4 | 780 | 1508 | forward 3 | Eukaryotic protein kinase domain | 4.60E−54 |
| 179 | 333965.1 | 1179 | 1979 | forward 3 | Eukaryotic protein kinase domain | 2.50E−59 |
| 179 | 333965.1 | 1980 | 2066 | forward 3 | Protein kinase C terminal domain | 2.30E−08 |
| 180 | 1328236.5 | 112 | 672 | forward 1 | Ras family | 5.90E−87 |
| 181 | 995534.3 | 686 | 811 | forward 2 | WD domain, G-beta repeat | 5.40E−05 |
| 182 | 1098887.1 | 325 | 612 | forward 1 | SCAN domain | 7.80E−70 |
| 182 | 1098887.1 | 1192 | 1260 | forward 1 | Zinc finger, C2H2 type | 4.60E−07 |
| 184 | 470023.2 | 456 | 815 | forward 3 | Serpins (serine protease inhibitors) | 2.40E−68 |
| 185 | 989966.8 | 424 | 1611 | forward 1 | N2,N2-dimethylguanosine tRNA methyltransferase | 2.60E−221 |
| 185 | 989966.8 | 1872 | 1958 | forward 3 | Zinc finger C-x8-C-x5-C-x3-H type (and similar). | 2.90E−04 |
| 186 | 233925.5 | 571 | 783 | forward 1 | RNA recognition motif. (a.k.a. RRM, RBD, or RNP domain) | 6.50E−20 |
| 187 | 405145.5 | 1112 | 1579 | forward 2 | GAF domain | 1.50E−28 |
| 187 | 405145.5 | 2456 | 3172 | forward 2 | 3'5'-cyclic nucleotide phosphodiesterase | 6.60E−96 |
| 188 | 261982.8 | 6390 | 6641 | forward 3 | Helicases conserved C-terminal domain | 2.00E−15 |
| 188 | 261982.8 | 4863 | 5843 | forward 3 | SNF2 and others N-terminal domain | 7.70E−139 |
| 193 | 898850.21 | 3205 | 3297 | forward 1 | Tau and MAP proteins, tubulin-binding | 1.60E−16 |
| 196 | 318000.4 | 225 | 755 | forward 3 | ADP-ribosylation factor family | 1.20E−39 |
| 196 | 318000.4 | 267 | 875 | forward 3 | Ras family | 7.20E−08 |
| 197 | 977887.1 | 2043 | 2825 | forward 3 | Uncharacterized protein family | 8.30E−97 |
| 198 | 1094199.1 | 513 | 707 | forward 3 | PAS domain | 1.50E−08 |
| 202 | 113621.5 | 89 | 625 | forward 2 | Tissue inhibitor of metalloproteinases | 1.20E−144 |
| 203 | 401532.2 | 1067 | 1882 | forward 2 | ABC transporter transmembrane region. | 4.40E−44 |
| 203 | 401532.2 | 4082 | 4633 | forward 2 | ABC transporter | 3.40E−46 |
| 207 | 475819.14 | 656 | 769 | forward 2 | Zinc finger, C3HC4 type (RING finger) | 1.80E−06 |
| 207 | 475819.14 | 656 | 769 | forward 2 | Zinc finger, C3HC4 type (RING finger) | 1.80E−06 |
| 208 | 241384.3 | 78 | 1982 | forward 3 | Glycosyl hydrolases family 35 | 0.00E+00 |
| 210 | 244200.1 | 394 | 948 | forward 1 | Glycosyl transferases | 2.40E−52 |
| 210 | 244200.1 | 1315 | 1692 | forward 1 | Similarity to lectin domain of ricin beta-chain, 3 copies. | 3.20E−45 |
| 214 | 903091.31 | 994 | 1131 | forward 1 | Zinc finger present in dystrophin, CBP/p300 | 3.30E−07 |
| 216 | 903091.16 | 876 | 1013 | forward 3 | Zinc finger present in dystrophin, CBP/p300 | 3.30E−07 |
| 218 | 475473.1 | 6003 | 6053 | forward 3 | Neuraxin and MAP1B proteins | 1.20E−08 |
| 223 | 903338.12 | 142 | 300 | forward 1 | Defensin propeptide | 3.00E−25 |
| 223 | 903338.12 | 337 | 423 | forward 1 | Mammalian defensin | 3.10E−14 |
| 225 | 1040667.52 | 1868 | 2074 | forward 2 | RNA recognition motif. (a.k.a. RRM, RBD, or RNP domain) | 2.40E−04 |
| 227 | 218524.4 | 596 | 1345 | forward 2 | 7 transmembrane receptor (rhodopsin family) | 7.10E−94 |
| 228 | 346673.1 | 533 | 727 | forward 2 | Double-stranded RNA binding motif | 2.60E−06 |
| 230 | 197086.1 | 1317 | 1460 | forward 3 | GRIP domain | 2.10E−07 |
| 231 | 348143.7 | 677 | 796 | forward 2 | UBA domain | 9.20E−13 |
| 231 | 348143.7 | 206 | 649 | forward 2 | Ubiquitin-conjugating enzyme | 5.50E−79 |
| 233 | 233003.6 | 509 | 604 | forward 2 | Ubiquitin carboxyl-terminal hydrolases family 2 | 8.60E−06 |
| 233 | 233003.6 | 1238 | 1504 | forward 2 | Ubiquitin carboxyl-terminal hydrolase family 2 | 3.30E−19 |
| 235 | 217860.1 | 559 | 900 | forward 1 | BTB/POZ domain | 4.40E−16 |
| 236 | 216189.2 | 431 | 898 | forward 2 | BTG1 family | 3.00E−103 |
| 238 | 382906.16 | 182 | 226 | forward 2 | Transmembrane 4 family | 4.40E−04 |
| 244 | 413835.5 | 250 | 633 | forward 1 | BTB/POZ domain | 3.60E−23 |
| 244 | 413835.5 | 1318 | 1386 | forward 1 | Zinc finger, C2H2 type | 7.80E−06 |
| 246 | 474673.1 | 4099 | 4554 | forward 1 | RhoGAP domain | 2.60E−54 |
| 247 | 480286.1 | 322 | 654 | forward 1 | Core histone H2A/H2B/H3/H4 | 2.50E−16 |
| 247 | 480286.1 | 347 | 679 | forward 2 | Core histone H2A/H2B/H3/H4 | 1.20E−14 |
| 252 | 253946.17 | 985 | 1254 | forward 1 | Fibronectin type III domain | 3.00E−14 |
| 261 | 82168.5 | 9273 | 9422 | forward 3 | Leucine rich repeat C-terminal domain | 6.40E−12 |
| 261 | 82168.5 | 9564 | 9980 | forward 3 | TIR domain | 6.60E−42 |
| 263 | 412661.2 | 269 | 463 | forward 2 | FHA domain | 4.30E−21 |
| 267 | 385608.2 | 251 | 991 | forward 2 | Transmembrane 4 family | 2.30E−160 |
| 279 | 82154.24 | 1684 | 1800 | forward 1 | WD domain, G-beta repeat | 7.70E−04 |
| 279 | 82154.24 | 1684 | 1800 | forward 1 | WD domain, G-beta repeat | 7.70E−04 |
| 283 | 90710.1 | 155 | 223 | forward 2 | Zinc finger, C2H2 type | 1.20E−04 |
| 290 | 350440.15 | 960 | 2684 | forward 3 | E1-E2 ATPase | 9.00E−59 |
| 290 | 350440.15 | 2599 | 2952 | forward 1 | E1-E2 ATPase | 8.60E−42 |
| 304 | 400280.3 | 600 | 803 | forward 3 | RNA recognition motif. (a.k.a. RRM, RBD, or RNP domain) | 3.80E−09 |
| 318 | 481847.1 | 202 | 318 | forward 1 | EGF-like domain | 5.20E−10 |
| 333 | 433569.1 | 450 | 1688 | forward 3 | Sulfatase | 4.70E−103 |
| 333 | 433569.1 | 260 | 1687 | forward 2 | Sulfatase | 5.50E−39 |
| 341 | 405041.1 | 435 | 533 | forward 3 | Ank repeat | 2.00E−08 |
| 342 | 474266.2 | 424 | 522 | forward 1 | Ank repeat | 2.30E−07 |
| 345 | 195199.1 | 886 | 984 | forward 1 | Ank repeat | 1.10E−04 |
| 348 | 256871.2 | 609 | 707 | forward 3 | Ank repeat | 2.00E−05 |
| 348 | 256871.2 | 609 | 707 | forward 3 | Ank repeat | 2.00E−05 |
| 356 | 344775.3 | 604 | 993 | forward 1 | SPRY domain | 1.80E−19 |
| 358 | 416874.3 | 313 | 558 | forward 1 | Kringle domain | 7.10E−37 |
| 358 | 416874.3 | 640 | 1362 | forward 1 | Trypsin | 1.70E−102 |
| 362 | 336953.7 | 2154 | 2882 | forward 3 | Biotin protein ligase | 2.30E−11 |
| 363 | 444771.2 | 2 | 352 | forward 2 | Elongation factor G C-terminus | 2.00E−04 |
| 364 | 449173.16 | 641 | 730 | forward2 | KH domain | 3.10E−04 |
| 367 | 252747.27 | 2298 | 2567 | forward 3 | C2 domain | 8.50E−17 |
| 369 | 1000084.27 | 152 | 1423 | forward 2 | Tubulin/FtsZ family | 2.40E−279 |
| 370 | 205607.5 | 1849 | 2733 | forward 1 | Phosphatidylinositol 3- and 4-kinases | 7.40E−116 |
| 370 | 205607.5 | 139 | 468 | forward 1 | C2 domain | 3.10E−44 |
| 370 | 205607.5 | 925 | 1668 | forward 1 | Phosphoinositide 3-kinase family, accessory domain (PIK dom | 2.10E−58 |
| 374 | 474724.5 | 340 | 780 | forward 1 | Eukaryotic protein kinase domain | 6.70E−25 |
| 394 | 238342.1 | 140 | 502 | forward 2 | BAH domain | 2.50E−16 |
| 411 | 411474.17 | 174 | 719 | forward 3 | ADP-ribosylation factor family | 7.60E−08 |
| 411 | 411474.17 | 231 | 815 | forward 3 | Ras family | 1.10E−112 |
| 415 | 263336.62 | 272 | 454 | forward 2 | Metallothionein | 2.10E−25 |
| 421 | 332919.4 | 703 | 801 | forward 1 | Ank repeat | 9.40E−08 |
| 425 | 987927.13 | 681 | 788 | forward 3 | EGF-like domain | 2.10E−04 |
| 427 | 1091415.2 | 775 | 1425 | forward 1 | Fibrinogen beta and gamma chains, C-terminal globular domai | 5.60E−63 |
| 430 | 444648.9 | 366 | 548 | forward 3 | Metallothionein | 1.20E−24 |
| 431 | 464689.22 | 608 | 1342 | forward 2 | Fatty acid desaturase | 1.20E−163 |
| 435 | 482336.11 | 95 | 310 | forward 2 | Intermediate filament proteins | 1.50E−21 |
| 442 | 210945.6 | 155 | 481 | forward 2 | FKBP-type peptidyl-prolyl cis-trans isomerases | 1.90E−52 |
| 448 | 345705.7 | 232 | 573 | forward 1 | BTB/POZ domain | 1.30E−28 |
| 448 | 345705.7 | 1525 | 1668 | forward 1 | Kelch motif | 2.50E−09 |
| 449 | 198212.1 | 816 | 986 | forward 3 | LIM domain containing proteins | 3.00E−15 |
| 450 | 198212.6 | 635 | 805 | forward 2 | LIM domain containing proteins | 3.00E−15 |
| 450 | 198212.6 | 277 | 453 | forward 1 | LIM domain containing proteins | 8.60E−07 |
| 450 | 198212.6 | 801 | 968 | forward 3 | LIM domain containing proteins | 2.10E−06 |
| 452 | 900031.4 | 2003 | 2101 | forward 2 | Ank repeat | 1.60E−05 |
| 452 | 900031.4 | 4406 | 4663 | forward 2 | Death domain | 9.40E−20 |
| 452 | 900031.4 | 509 | 1297 | forward 2 | Eukaryotic protein kinase domain | 4.60E−87 |
| 453 | 475365.4 | 607 | 1455 | forward 1 | Zinc carboxypeptidase | 1.30E−111 |
| 454 | 222810.1 | 384 | 965 | forward 3 | 7 transmembrane receptor (rhodopsin family) | 2.60E−34 |
| 454 | 222810.1 | 206 | 409 | forward 2 | 7 transmembrane receptor (rhodopsin family) | 1.00E−15 |
| 455 | 1084493.6 | 516 | 995 | forward 3 | Eukaryotic protein kinase domain | 1.00E−47 |
| 455 | 1084493.6 | 31 | 258 | forward 1 | Eukaryotic protein kinase domain | 2.70E−08 |
| 457 | 346686.23 | 1881 | 2129 | forward 3 | Fibronectin type III domain | 1.00E−06 |
| 462 | 243103.24 | 683 | 778 | forward 2 | EGF-like domain | 7.40E−09 |
| 463 | 469883.1 | 2253 | 2426 | forward 3 | Immunoglobulin domain | 5.20E−08 |
| 463 | 469883.1 | 2052 | 2210 | forward 3 | Plexin repeat | 4.80E−09 |
| 463 | 469883.1 | 696 | 1994 | forward 3 | Sema domain | 1.40E−207 |
| 466 | 903691.6 | 261 | 344 | forward 3 | Leucine rich repeat N-terminal domain | 5.60E−04 |
| 470 | 474630.19 | 4403 | 4657 | forward 2 | Fibronectin type III domain | 1.80E−25 |
| 470 | 474630.19 | 3493 | 3738 | forward 1 | Fibronectin type III domain | 3.70E−19 |
| 470 | 474630.19 | 264 | 1520 | forward 3 | Integrins, beta chain | 6.3e−317 |
| 472 | 1092445.1 | 399 | 686 | forward 3 | SCAN domain | 5.50E−58 |
| 472 | 1092445.1 | 1437 | 1505 | forward 3 | Zinc finger, C2H2 type | 2.40E−07 |
| 477 | 347005.5 | 361 | 603 | forward 1 | Fibronectin type III domain | 9.60E−18 |
| 477 | 347005.5 | 5206 | 5913 | forward 1 | Protein-tyrosine phosphatase | 1.50E−140 |
| 481 | 466402.116 | 657 | 1082 | forward 3 | Myelin basic protein | 9.50E−08 |
| 484 | 254107.1 | 1446 | 1553 | forward 3 | EGF-like domain | 3.60E−05 |
| 485 | 208328.1 | 58 | 273 | forward 1 | Ubiquitin family | 7.90E−09 |
| 489 | 336256.1 | 1478 | 1618 | forward 2 | Hemopexin | 2.60E−16 |
| 489 | 336256.1 | 347 | 901 | forward 2 | Matrixin | 1.10E−56 |
| 491 | 351432.3 | 2537 | 4858 | forward 2 | HCO3- transporter family | 0.00E+00 |
| 493 | 332595.1 | 320 | 616 | forward 2 | Cadherin domain | 1.20E−09 |
| 493 | 332595.1 | 1 | 261 | forward 1 | Cadherin domain | 7.60E−07 |
| 499 | 344582.19 | 375 | 497 | forward 3 | TNFR/NGFR cysteine-rich region | 6.80E−05 |
| 500 | 997526.4 | 5 | 202 | forward 2 | HMG (high mobility group) box | 8.20E−13 |

[0179] TABLE 3

| SEQ ID- | | | | | |
|---|---|---|---|---|---|
| NO | TEMPLATE ID | START | STOP | FRAME | DOMAIN |
| 1 | 441269.2 | 928 | 1008 | forward 1 | SP |
| 2 | 3161.5 | 571 | 651 | forward 1 | TM |
| 2 | 3161.5 | 1426 | 1506 | forward 1 | TM |
| 2 | 3161.5 | 388 | 471 | forward 1 | SP |
| 2 | 3161.5 | 382 | 468 | forward 1 | TM |
| 3 | 977955.7 | 174 | 263 | forward 3 | SP |
| 4 | 350754.2 | 651 | 749 | forward 3 | SP |
| 4 | 350754.2 | 270 | 362 | forward 3 | SP |
| 6 | 1099593.13 | 730 | 810 | forward 1 | SP |
| 6 | 1099593.13 | 2130 | 2210 | forward 3 | TM |
| 7 | 1099593.2 | 161 | 259 | forward 2 | SP |
| 11 | 347915.14 | 4742 | 4840 | forward 2 | SP |
| 12 | 997395.1 | 3240 | 3323 | forward 3 | SP |
| 12 | 997395.1 | 2100 | 2180 | forward 3 | SP |
| 12 | 997395.1 | 3187 | 3291 | forward 1 | SP |
| 13 | 332783.1 | 1164 | 1244 | forward 3 | TM |
| 13 | 332783.1 | 1434 | 1511 | forward 3 | TM |
| 14 | 422289.1 | 2247 | 2327 | forward 3 | TM |
| 14 | 422289.1 | 2059 | 2142 | forward 1 | SP |
| 15 | 899410.5 | 1077 | 1163 | forward 3 | TM |
| 15 | 899410.5 | 2158 | 2244 | forward 1 | SP |
| 15 | 899410.5 | 350 | 430 | forward 2 | SP |
| 16 | 404155.2 | 265 | 348 | forward 1 | TM |
| 19 | 345860.21 | 772 | 864 | forward 1 | SP |
| 23 | 474069.8 | 970 | 1050 | forward 1 | TM |
| 26 | 216331.1 | 1465 | 1551 | forward 1 | TM |
| 27 | 482517.3 | 1939 | 2019 | forward 1 | TM |
| 27 | 482517.3 | 148 | 228 | forward 1 | TM |
| 27 | 482517.3 | 350 | 424 | forward 2 | TM |
| 27 | 482517.3 | 1170 | 1253 | forward 3 | SP |
| 27 | 482517.3 | 1490 | 1564 | forward 2 | TM |
| 27 | 482517.3 | 1753 | 1833 | forward 1 | TM |
| 27 | 482517.3 | 300 | 377 | forward 3 | TM |
| 29 | 978047.1 | 1784 | 1861 | forward 2 | TM |
| 29 | 978047.1 | 1834 | 1914 | forward 1 | TM |
| 29 | 978047.1 | 1094 | 1180 | forward 2 | SP |
| 33 | 898068.6 | 446 | 532 | forward 2 | SP |
| 35 | 903104.8 | 1628 | 1717 | forward 2 | TM |
| 36 | 412065.21 | 1549 | 1635 | forward 1 | SP |
| 36 | 412065.21 | 1478 | 1579 | forward 2 | SP |
| 37 | 399067.1 | 2363 | 2446 | forward 2 | TM |
| 37 | 399067.1 | 109 | 189 | forward 1 | SP |
| 38 | 237709.11 | 301 | 384 | forward 1 | SP |
| 39 | 237709.5 | 766 | 849 | forward 1 | SP |
| 40 | 216437.4 | 432 | 527 | forward 3 | SP |
| 40 | 216437.4 | 479 | 559 | forward 2 | TM |
| 42 | 27798.1 | 57 | 137 | forward 3 | TM |
| 42 | 27798.1 | 2134 | 2226 | forward 1 | SP |
| 42 | 27798.1 | 1483 | 1566 | forward 1 | SP |
| 44 | 376085.9 | 656 | 751 | forward 2 | SP |
| 46 | 903508.12 | 2552 | 2632 | forward 2 | TM |
| 49 | 391406.5 | 463 | 546 | forward 1 | SP |
| 49 | 391406.5 | 2070 | 2153 | forward 3 | SP |
| 50 | 391406.24 | 208 | 291 | forward 1 | SP |
| 51 | 474588.21 | 1315 | 1392 | forward 1 | TM |
| 53 | 246862.9 | 834 | 932 | forward 3 | SP |
| 54 | 246862.17 | 1393 | 1473 | forward 1 | SP |
| 54 | 246862.17 | 934 | 1032 | forward 1 | SP |
| 54 | 246862.17 | 1573 | 1662 | forward 1 | SP |
| 57 | 314831.5 | 1070 | 1159 | forward 2 | SP |
| 58 | 391940.1 | 1112 | 1192 | forward 2 | SP |
| 58 | 391940.1 | 5869 | 5946 | forward 1 | TM |
| 58 | 391940.1 | 4958 | 5038 | forward 2 | SP |
| 58 | 391940.1 | 6060 | 6146 | forward 3 | SP |
| 59 | 454958.13 | 214 | 291 | forward 1 | SP |
| 61 | 238203.11 | 2656 | 2733 | forward 1 | SP |
| 61 | 238203.11 | 4781 | 4864 | forward 2 | TM |
| 61 | 238203.11 | 4074 | 4154 | forward 3 | TM |
| 62 | 994057.21 | 819 | 902 | forward 3 | SP |
| 62 | 994057.21 | 3427 | 3498 | forward 1 | TM |
| 62 | 994057.21 | 1776 | 1862 | forward 3 | TM |
| 66 | 482336.2 | 1051 | 1137 | forward 1 | SP |
| 66 | 482336.2 | 1702 | 1785 | forward 1 | SP |
| 67 | 482336.14 | 934 | 1020 | forward 1 | SP |
| 67 | 482336.14 | 1585 | 1668 | forward 1 | SP |
| 68 | 66522.1 | 294 | 380 | forward 3 | TM |
| 68 | 66522.1 | 31 | 108 | forward 1 | SP |
| 69 | 300294.3 | 1976 | 2053 | forward 2 | SP |
| 71 | 475028.7 | 1972 | 2061 | forward 1 | SP |
| 72 | 481223.3 | 2466 | 2561 | forward 3 | SP |
| 72 | 481223.3 | 1326 | 1406 | forward 3 | SP |
| 76 | 255778.11 | 1290 | 1376 | forward 3 | TM |
| 80 | 201342.4 | 528 | 608 | forward 3 | TM |
| 81 | 204542.1 | 9 | 92 | forward 3 | SP |
| 83 | 204386.1 | 1466 | 1549 | forward 2 | SP |
| 83 | 204386.1 | 1553 | 1642 | forward 2 | SP |
| 84 | 335086.1 | 2638 | 2718 | forward 1 | TM |
| 84 | 335086.1 | 376 | 462 | forward 1 | TM |
| 86 | 1063057.1 | 293 | 382 | forward 2 | SP |
| 87 | 199905.1 | 4765 | 4851 | forward 1 | TM |
| 87 | 199905.1 | 2052 | 2129 | forward 3 | SP |
| 87 | 199905.1 | 817 | 900 | forward 1 | SP |
| 87 | 199905.1 | 981 | 1052 | forward 3 | TM |
| 87 | 199905.1 | 236 | 340 | forward 2 | SP |
| 88 | 11329.1 | 185 | 265 | forward 2 | TM |
| 90 | 330878.6 | 2974 | 3066 | forward 1 | TM |
| 90 | 330878.6 | 2328 | 2405 | forward 3 | TM |
| 91 | 331793.11 | 3030 | 3107 | forward 3 | TM |
| 91 | 331793.11 | 139 | 219 | forward 1 | SP |
| 95 | 1095702.14 | 256 | 342 | forward 1 | SP |
| 97 | 977667.1 | 234 | 311 | forward 3 | TM |
| 101 | 382293.16 | 2167 | 2316 | forward 1 | SP |
| 101 | 382293.16 | 5189 | 5278 | forward 2 | SP |
| 101 | 382293.16 | 6113 | 6205 | forward 2 | SP |
| 101 | 382293.16 | 598 | 687 | forward 1 | SP |
| 101 | 382293.16 | 6017 | 6097 | forward 2 | SP |
| 101 | 382293.16 | 596 | 682 | forward 2 | SP |
| 102 | 382293.15 | 2423 | 2572 | forward 2 | SP |
| 102 | 382293.15 | 827 | 916 | forward 2 | SP |
| 102 | 382293.15 | 816 | 902 | forward 3 | SP |
| 104 | 235943.36 | 572 | 664 | forward 2 | SP |
| 104 | 235943.36 | 52 | 132 | forward 1 | SP |
| 106 | 234107.2 | 54 | 134 | forward 3 | SP |
| 108 | 482423.1 | 842 | 931 | forward 2 | SP |
| 108 | 482423.1 | 389 | 466 | forward 2 | SP |
| 109 | 441298.14 | 4843 | 4923 | forward 1 | SP |
| 109 | 441298.14 | 480 | 569 | forward 3 | SP |
| 109 | 441298.14 | 4439 | 4519 | forward 2 | SP |
| 112 | 992317.12 | 219 | 323 | forward 3 | SP |
| 113 | 230936.6 | 2690 | 2776 | forward 2 | TM |
| 113 | 230936.6 | 2433 | 2528 | forward 3 | SP |
| 115 | 984900.1 | 464 | 541 | forward 2 | TM |
| 116 | 405158.1 | 3164 | 3238 | forward 2 | TM |
| 116 | 405158.1 | 4889 | 4972 | forward 2 | SP |
| 116 | 405158.1 | 4318 | 4404 | forward 1 | TM |
| 116 | 405158.1 | 5463 | 5540 | forward 3 | TM |
| 120 | 1087696.7 | 56 | 142 | forward 2 | SP |
| 122 | 399128.1 | 27 | 116 | forward 3 | TM |
| 123 | 986565.15 | 1255 | 1335 | forward 1 | TM |
| 123 | 986565.15 | 2254 | 2331 | forward 1 | TM |
| 123 | 986565.15 | 1121 | 1204 | forward 2 | SP |
| 123 | 986565.15 | 2148 | 2225 | forward 3 | TM |
| 123 | 986565.15 | 2493 | 2570 | forward 3 | TM |
| 123 | 986565.15 | 1430 | 1522 | forward 2 | SP |
| 126 | 233594.4 | 613 | 699 | forward 1 | SP |
| 128 | 1080496.1 | 1278 | 1373 | forward 3 | SP |
| 129 | 351204.2 | 554 | 631 | forward 2 | SP |
| 129 | 351204.2 | 35 | 124 | forward 2 | SP |
| 132 | 427529.9 | 145 | 225 | forward 1 | SP |
| 133 | 474868.2 | 459 | 542 | forward 3 | SP |
| 133 | 474868.2 | 382 | 468 | forward 1 | SP |
| 134 | 1095839.17 | 406 | 501 | forward 1 | SP |
| 135 | 1095839.1 | 29 | 142 | forward 2 | SP |
| 135 | 1095839.1 | 1105 | 1182 | forward 1 | TM |
| 135 | 1095839.1 | 1813 | 1890 | forward 1 | TM |
| 136 | 244251.4 | 239 | 325 | forward 2 | SP |
| 136 | 244251.4 | 720 | 800 | forward 3 | SP |
| 136 | 244251.4 | 70 | 150 | forward 1 | TM |
| 136 | 244251.4 | 651 | 734 | forward 3 | TM |
| 138 | 234157.3 | 1914 | 2006 | forward 3 | SP |
| 142 | 407260.2 | 296 | 382 | forward 2 | SP |
| 145 | 231270.1 | 1138 | 1227 | forward 1 | SP |
| 148 | 404197.4 | 5001 | 5081 | forward 3 | SP |
| 148 | 404197.4 | 461 | 562 | forward 2 | SP |
| 148 | 404197.4 | 1523 | 1615 | forward 2 | SP |
| 150 | 346511.4 | 3324 | 3428 | forward 3 | SP |
| 152 | 331233.2 | 19 | 114 | forward 1 | SP |
| 154 | 238118.1 | 21 | 98 | forward 3 | TM |
| 155 | 233596.5 | 1762 | 1839 | forward 1 | TM |
| 155 | 233596.5 | 2332 | 2421 | forward 1 | SP |
| 156 | 988653.1 | 1080 | 1166 | forward 3 | SP |
| 156 | 988653.1 | 3422 | 3502 | forward 2 | TM |
| 157 | 470468.26 | 913 | 999 | forward 1 | SP |
| 159 | 903479.3 | 2576 | 2659 | forward 2 | TM |
| 159 | 903479.3 | 2571 | 2663 | forward 3 | TM |
| 159 | 903479.3 | 6877 | 6951 | forward 1 | TM |
| 159 | 903479.3 | 2017 | 2094 | forward 1 | TM |
| 159 | 903479.3 | 2563 | 2640 | forward 1 | TM |
| 159 | 903479.3 | 5437 | 5514 | forward 1 | TM |
| 159 | 903479.3 | 5549 | 5632 | forward 2 | TM |
| 161 | 1094412.1 | 179 | 259 | forward 2 | SP |
| 161 | 1094412.1 | 1565 | 1651 | forward 2 | SP |
| 162 | 1094107.1 | 179 | 259 | forward 2 | SP |
| 162 | 1094107.1 | 1510 | 1596 | forward 1 | SP |
| 162 | 1094107.1 | 669 | 794 | forward 3 | SP |
| 164 | 12178.2 | 387 | 461 | forward 3 | TM |
| 164 | 12178.2 | 430 | 510 | forward 1 | SP |
| 166 | 978478.4 | 791 | 862 | forward 2 | TM |
| 167 | 85942.2 | 285 | 371 | forward 3 | SP |
| 170 | 283762.2 | 4645 | 4725 | forward 1 | TM |
| 170 | 283762.2 | 4511 | 4600 | forward 2 | SP |
| 171 | 331065.2 | 72 | 161 | forward 3 | SP |
| 173 | 252782.4 | 3071 | 3154 | forward 2 | SP |
| 173 | 252782.4 | 1839 | 1922 | forward 3 | TM |
| 173 | 252782.4 | 1371 | 1451 | forward 3 | TM |
| 173 | 252782.4 | 1800 | 1883 | forward 3 | SP |
| 174 | 229068.1 | 648 | 731 | forward 3 | SP |
| 175 | 407450.7 | 1416 | 1502 | forward 3 | TM |
| 176 | 200163.2 | 367 | 450 | forward 1 | SP |
| 176 | 200163.2 | 3400 | 3474 | forward 1 | TM |
| 176 | 200163.2 | 3730 | 3828 | forward 1 | SP |
| 178 | 1328237.4 | 685 | 777 | forward 1 | SP |
| 178 | 1328237.4 | 2079 | 2159 | forward 3 | TM |
| 178 | 1328237.4 | 2006 | 2089 | forward 2 | TM |
| 178 | 1328237.4 | 2374 | 2451 | forward 1 | TM |
| 179 | 333965.1 | 1357 | 1440 | forward 1 | SP |
| 179 | 333965.1 | 435 | 542 | forward 3 | SP |
| 180 | 1328236.5 | 1014 | 1091 | forward 3 | TM |
| 181 | 995534.3 | 708 | 797 | forward 3 | SP |
| 184 | 470023.2 | 306 | 389 | forward 3 | SP |
| 186 | 233925.5 | 1436 | 1510 | forward 2 | TM |
| 186 | 233925.5 | 440 | 523 | forward 2 | SP |
| 186 | 233925.5 | 1901 | 1984 | forward 2 | TM |
| 186 | 233925.5 | 3519 | 3596 | forward 3 | TM |
| 187 | 405145.5 | 6884 | 6967 | forward 2 | TM |
| 187 | 405145.5 | 6924 | 7043 | forward 3 | SP |
| 187 | 405145.5 | 1491 | 1574 | forward 3 | SP |
| 188 | 261982.8 | 7984 | 8061 | forward 1 | TM |
| 188 | 261982.8 | 9033 | 9110 | forward 3 | TM |
| 188 | 261982.8 | 9430 | 9522 | forward 1 | TM |
| 188 | 261982.8 | 7748 | 7828 | forward 2 | TM |
| 189 | 246285.1 | 833 | 937 | forward 2 | SP |
| 190 | 228511.1 | 4994 | 5074 | forward 2 | TM |
| 190 | 228511.1 | 4777 | 4854 | forward 1 | SP |
| 190 | 228511.1 | 1557 | 1640 | forward 3 | TM |
| 191 | 40290.1 | 656 | 736 | forward 2 | TM |
| 193 | 898850.21 | 4370 | 4456 | forward 2 | TM |
| 193 | 898850.21 | 3429 | 3518 | forward 3 | SP |
| 194 | 201356.1 | 923 | 1006 | forward 2 | TM |
| 196 | 318000.4 | 2025 | 2102 | forward 3 | SP |
| 196 | 318000.4 | 1684 | 1764 | forward 1 | TM |
| 197 | 977887.1 | 1426 | 1536 | forward 1 | SP |
| 197 | 977887.1 | 3731 | 3820 | forward 2 | SP |
| 198 | 1094199.1 | 1516 | 1641 | forward 1 | SP |
| 198 | 1094199.1 | 4082 | 4174 | forward 2 | SP |
| 202 | 113621.5 | 1299 | 1382 | forward 3 | SP |
| 202 | 113621.5 | 17 | 94 | forward 2 | SP |
| 203 | 401532.2 | 3138 | 3251 | forward 3 | SP |
| 203 | 401532.2 | 5214 | 5291 | forward 3 | TM |
| 203 | 401532.2 | 1914 | 1991 | forward 3 | SP |
| 203 | 401532.2 | 1415 | 1498 | forward 2 | SP |
| 203 | 401532.2 | 3449 | 3532 | forward 2 | TM |
| 203 | 401532.2 | 4014 | 4103 | forward 3 | SP |
| 205 | 351209.14 | 256 | 336 | forward 1 | SP |
| 206 | 351209.16 | 2134 | 2223 | forward 1 | SP |
| 206 | 351209.16 | 285 | 368 | forward 3 | SP |
| 206 | 351209.16 | 266 | 352 | forward 2 | SP |
| 208 | 241384.3 | 1003 | 1098 | forward 1 | SP |
| 208 | 241384.3 | 45 | 146 | forward 3 | SP |
| 210 | 244200.1 | 2306 | 2389 | forward 2 | TM |
| 210 | 244200.1 | 2136 | 2219 | forward 3 | TM |
| 216 | 903091.16 | 1420 | 1506 | forward 1 | SP |
| 216 | 903091.16 | 1768 | 1854 | forward 1 | SP |
| 218 | 475473.1 | 5134 | 5223 | forward 1 | SP |
| 218 | 475473.1 | 7072 | 7152 | forward 1 | SP |
| 219 | 354430.4 | 4937 | 5020 | forward 2 | SP |
| 219 | 354430.4 | 6314 | 6409 | forward 2 | SP |
| 219 | 354430.4 | 469 | 546 | forward 1 | SP |
| 219 | 354430.4 | 5436 | 5540 | forward 3 | SP |
| 223 | 903338.12 | 115 | 198 | forward 1 | SP |
| 225 | 1040667.52 | 3266 | 3349 | forward 2 | TM |
| 225 | 1040667.52 | 666 | 749 | forward 3 | SP |
| 225 | 1040667.52 | 3309 | 3395 | forward 3 | SP |
| 225 | 1040667.52 | 510 | 590 | forward 3 | TM |
| 225 | 1040667.52 | 3408 | 3491 | forward 3 | SP |
| 227 | 218524.4 | 1130 | 1210 | forward 2 | SP |
| 227 | 218524.4 | 1350 | 1433 | forward 3 | SP |
| 227 | 218524.4 | 554 | 634 | forward 2 | TM |
| 229 | 58775.1 | 2 | 88 | forward 2 | SP |
| 231 | 348143.7 | 2697 | 2771 | forward 3 | TM |
| 231 | 348143.7 | 4440 | 4526 | forward 3 | TM |
| 231 | 348143.7 | 1859 | 1939 | forward 2 | TM |
| 233 | 233003.6 | 402 | 479 | forward 3 | TM |
| 236 | 216189.2 | 843 | 920 | forward 3 | SP |
| 236 | 216189.2 | 1332 | 1418 | forward 3 | SP |
| 236 | 216189.2 | 1035 | 1118 | forward 3 | SP |
| 238 | 382906.16 | 155 | 238 | forward 2 | SP |
| 241 | 346016.5 | 1841 | 1924 | forward 2 | SP |
| 241 | 346016.5 | 1921 | 2013 | forward 1 | SP |
| 241 | 346016.5 | 2054 | 2161 | forward 2 | SP |
| 241 | 346016.5 | 359 | 448 | forward 2 | SP |
| 242 | 346016.6 | 1836 | 1919 | forward 3 | SP |
| 242 | 346016.6 | 1799 | 1891 | forward 2 | SP |
| 242 | 346016.6 | 2049 | 2156 | forward 3 | SP |
| 242 | 346016.6 | 1737 | 1829 | forward 3 | SP |
| 242 | 346016.6 | 4777 | 4854 | forward 1 | SP |
| 244 | 413835.5 | 3440 | 3517 | forward 2 | SP |
| 246 | 474673.1 | 5054 | 5125 | forward 2 | TM |
| 246 | 474673.1 | 6072 | 6155 | forward 3 | TM |
| 246 | 474673.1 | 1883 | 1966 | forward 2 | TM |
| 246 | 474673.1 | 6379 | 6456 | forward 1 | TM |
| 246 | 474673.1 | 7446 | 7526 | forward 3 | TM |
| 246 | 474673.1 | 8881 | 8964 | forward 1 | TM |
| 248 | 402640.1 | 449 | 526 | forward 2 | TM |
| 248 | 402640.1 | 369 | 476 | forward 3 | SP |
| 252 | 253946.17 | 6747 | 6842 | forward 3 | SP |
| 252 | 253946.17 | 4350 | 4430 | forward 3 | TM |
| 252 | 253946.17 | 5326 | 5406 | forward 1 | TM |
| 252 | 253946.17 | 7207 | 7284 | forward 1 | TM |
| 252 | 253946.17 | 245 | 322 | forward 2 | SP |
| 254 | 997704.1 | 209 | 322 | forward 2 | SP |
| 261 | 82168.5 | 1162 | 1248 | forward 1 | SP |
| 261 | 82168.5 | 1456 | 1530 | forward 1 | TM |
| 261 | 82168.5 | 7638 | 7718 | forward 3 | TM |
| 261 | 82168.5 | 7016 | 7099 | forward 2 | SP |
| 263 | 412661.2 | 10202 | 10297 | forward 2 | SP |
| 263 | 412661.2 | 1842 | 1919 | forward 3 | SP |
| 264 | 206310.2 | 1856 | 1933 | forward 2 | SP |
| 266 | 385608.47 | 3643 | 3720 | forward 1 | TM |
| 267 | 385608.2 | 422 | 529 | forward 2 | SP |
| 267 | 385608.2 | 260 | 340 | forward 2 | TM |
| 267 | 385608.2 | 890 | 973 | forward 2 | TM |
| 267 | 385608.2 | 473 | 550 | forward 2 | TM |
| 269 | 978402.3 | 159 | 242 | forward 3 | SP |
| 270 | 232146.1 | 1274 | 1387 | forward 2 | SP |
| 273 | 239797.3 | 346 | 426 | forward 1 | SP |
| 276 | 427554.6 | 59 | 154 | forward 2 | SP |
| 276 | 427554.6 | 79 | 156 | forward 1 | TM |
| 278 | 82154.23 | 267 | 347 | forward 3 | SP |
| 280 | 1137293.16 | 146 | 226 | forward 2 | SP |
| 288 | 477387.7 | 661 | 744 | forward 1 | SP |
| 290 | 350440.15 | 1123 | 1203 | forward 1 | SP |
| 290 | 350440.15 | 3629 | 3703 | forward 2 | SP |
| 290 | 350440.15 | 3972 | 4052 | forward 3 | TM |
| 290 | 350440.15 | 3146 | 3226 | forward 2 | SP |
| 290 | 350440.15 | 3377 | 3460 | forward 2 | SP |
| 292 | 997395.4 | 509 | 589 | forward 2 | SP |
| 295 | 201436.3 | 1688 | 1771 | forward 2 | SP |
| 295 | 201436.3 | 1658 | 1735 | forward 2 | TM |
| 296 | 198947.1 | 422 | 502 | forward 2 | SP |
| 296 | 198947.1 | 451 | 543 | forward 1 | SP |
| 296 | 198947.1 | 231 | 308 | forward 3 | SP |
| 304 | 400280.3 | 4930 | 5010 | forward 1 | SP |
| 304 | 400280.3 | 766 | 855 | forward 1 | SP |
| 304 | 400280.3 | 6645 | 6722 | forward 3 | TM |
| 304 | 400280.3 | 134 | 217 | forward 2 | TM |
| 304 | 400280.3 | 137 | 217 | forward 2 | SP |
| 304 | 400280.3 | 871 | 972 | forward 1 | SP |
| 304 | 400280.3 | 2963 | 3046 | forward 2 | SP |
| 304 | 400280.3 | 4929 | 5012 | forward 3 | TM |
| 304 | 400280.3 | 606 | 695 | forward 3 | TM |
| 304 | 400280.3 | 5865 | 5951 | forward 3 | TM |
| 304 | 400280.3 | 2746 | 2820 | forward 1 | TM |
| 305 | 17320.1 | 1071 | 1151 | forward 3 | SP |
| 308 | 107405.1 | 305 | 382 | forward 2 | TM |
| 310 | 337024.3 | 1776 | 1859 | forward 3 | TM |
| 318 | 481847.1 | 122 | 214 | forward 2 | SP |
| 319 | 235636.1 | 426 | 506 | forward 3 | TM |
| 322 | 16760.1 | 139 | 225 | forward 1 | SP |
| 323 | 198522.1 | 684 | 764 | forward 3 | TM |
| 323 | 198522.1 | 297 | 380 | forward 3 | TM |
| 329 | 903269.4 | 1479 | 1562 | forward 3 | TM |
| 329 | 903269.4 | 4041 | 4148 | forward 3 | SP |
| 329 | 903269.4 | 180 | 266 | forward 3 | SP |
| 330 | 351166.1 | 183 | 257 | forward 3 | TM |
| 331 | 344713.3 | 168 | 254 | forward 3 | TM |
| 332 | 167920.1 | 26 | 109 | forward 2 | TM |
| 332 | 167920.1 | 188 | 271 | forward 2 | TM |
| 333 | 433569.1 | 970 | 1044 | forward 1 | SP |
| 333 | 433569.1 | 149 | 241 | forward 2 | SP |
| 335 | 348121.9 | 4210 | 4299 | forward 1 | SP |
| 341 | 405041.1 | 94 | 186 | forward 1 | SP |
| 342 | 474266.2 | 2672 | 2749 | forward 2 | TM |
| 342 | 474266.2 | 617 | 700 | forward 2 | SP |
| 342 | 474266.2 | 2725 | 2808 | forward 1 | TM |
| 347 | 372313.6 | 2350 | 2424 | forward 1 | TM |
| 348 | 256871.2 | 5 | 100 | forward 2 | SP |
| 348 | 256871.2 | 5 | 100 | forward 2 | SP |
| 350 | 22485.15 | 308 | 394 | forward 2 | SP |
| 350 | 22485.15 | 13 | 102 | forward 1 | SP |
| 351 | 22485.1 | 360 | 446 | forward 3 | SP |
| 351 | 22485.1 | 65 | 154 | forward 2 | SP |
| 352 | 26410.1 | 337 | 417 | forward 1 | TM |
| 354 | 472165.22 | 1863 | 1949 | forward 3 | SP |
| 355 | 206580.1 | 227 | 307 | forward 2 | TM |
| 358 | 416874.3 | 76 | 165 | forward 1 | SP |
| 364 | 449173.16 | 1573 | 1653 | forward 1 | TM |
| 367 | 252747.27 | 270 | 353 | forward 3 | SP |
| 369 | 1000084.27 | 4622 | 4705 | forward 2 | SP |
| 369 | 1000084.27 | 309 | 410 | forward 3 | SP |
| 369 | 1000084.27 | 1089 | 1169 | forward 3 | SP |
| 369 | 1000084.27 | 4170 | 4259 | forward 3 | SP |
| 369 | 1000084.27 | 4040 | 4123 | forward 2 | SP |
| 369 | 1000084.27 | 4138 | 4227 | forward 1 | SP |
| 370 | 205607.5 | 2447 | 2533 | forward 2 | SP |
| 370 | 205607.5 | 2060 | 2146 | forward 2 | SP |
| 371 | 1089426.1 | 625 | 714 | forward 1 | SP |
| 371 | 1089426.1 | 482 | 562 | forward 2 | SP |
| 374 | 474724.5 | 3145 | 3222 | forward 1 | TM |
| 374 | 474724.5 | 2538 | 2618 | forward 3 | TM |
| 374 | 474724.5 | 3103 | 3189 | forward 1 | SP |
| 374 | 474724.5 | 1154 | 1234 | forward 2 | TM |
| 374 | 474724.5 | 3544 | 3630 | forward 1 | TM |
| 377 | 229298.1 | 2450 | 2551 | forward 2 | SP |
| 377 | 229298.1 | 923 | 1015 | forward 2 | SP |
| 378 | 229298.2 | 28 | 114 | forward 1 | SP |
| 378 | 229298.2 | 128 | 220 | forward 2 | SP |
| 384 | 344398.2 | 1812 | 1889 | forward 3 | TM |
| 384 | 344398.2 | 2095 | 2172 | forward 1 | SP |
| 394 | 238342.1 | 1451 | 1534 | forward 2 | SP |
| 394 | 238342.1 | 2636 | 2716 | forward 2 | SP |
| 397 | 347865.4 | 584 | 664 | forward 2 | SP |
| 398 | 40057.2 | 1114 | 1209 | forward 1 | SP |
| 404 | 238071.2 | 3338 | 3415 | forward 2 | TM |
| 404 | 238071.2 | 969 | 1049 | forward 3 | SP |
| 404 | 238071.2 | 3274 | 3357 | forward 1 | TM |
| 404 | 238071.2 | 593 | 673 | forward 2 | SP |
| 404 | 238071.2 | 630 | 704 | forward 3 | TM |
| 404 | 238071.2 | 3301 | 3381 | forward 1 | SP |
| 407 | 221812.1 | 10 | 96 | forward 1 | TM |
| 410 | 347796.7 | 2467 | 2550 | forward 1 | TM |
| 411 | 411474.17 | 4552 | 4647 | forward 1 | SP |
| 416 | 153860.6 | 454 | 543 | forward 1 | SP |
| 417 | 154178.1 | 270 | 356 | forward 3 | SP |
| 418 | 337888.3 | 1716 | 1799 | forward 3 | TM |
| 418 | 337888.3 | 963 | 1040 | forward 3 | TM |
| 420 | 160011.1 | 419 | 505 | forward 2 | TM |
| 420 | 160011.1 | 447 | 530 | forward 3 | TM |
| 427 | 1091415.2 | 226 | 315 | forward 1 | SP |
| 431 | 464689.22 | 4918 | 4998 | forward 1 | TM |
| 434 | 351241.1 | 139 | 219 | forward 1 | TM |
| 436 | 482336.31 | 1147 | 1230 | forward 1 | SP |
| 437 | 197538.2 | 358 | 465 | forward 1 | SP |
| 438 | 197538.8 | 795 | 875 | forward 3 | TM |
| 442 | 210945.6 | 513 | 605 | forward 3 | SP |
| 442 | 210945.6 | 408 | 488 | forward 3 | SP |
| 444 | 403448.2 | 2437 | 2517 | forward 1 | TM |
| 444 | 403448.2 | 1994 | 2071 | forward 2 | TM |
| 444 | 403448.2 | 2034 | 2114 | forward 3 | TM |
| 446 | 146382.22 | 1394 | 1486 | forward 2 | SP |
| 447 | 146382.25 | 36 | 128 | forward 3 | SP |
| 448 | 345705.7 | 365 | 448 | forward 2 | SP |
| 448 | 345705.7 | 101 | 190 | forward 2 | SP |
| 452 | 900031.4 | 2733 | 2816 | forward 3 | SP |
| 452 | 900031.4 | 4841 | 4939 | forward 2 | SP |
| 452 | 900031.4 | 4494 | 4574 | forward 3 | SP |
| 453 | 475365.4 | 1519 | 1599 | forward 1 | SP |
| 454 | 222810.1 | 161 | 244 | forward 2 | TM |
| 455 | 1084493.6 | 2952 | 3044 | forward 3 | SP |
| 456 | 979005.2 | 1477 | 1557 | forward 1 | TM |
| 456 | 979005.2 | 2740 | 2820 | forward 1 | TM |
| 456 | 979005.2 | 1409 | 1486 | forward 2 | TM |
| 457 | 346686.23 | 2997 | 3080 | forward 3 | SP |
| 457 | 346686.23 | 1993 | 2076 | forward 1 | SP |
| 457 | 346686.23 | 2184 | 2258 | forward 3 | TM |
| 457 | 346686.23 | 303 | 389 | forward 3 | SP |
| 457 | 346686.23 | 2151 | 2240 | forward 3 | SP |
| 458 | 234568.25 | 202 | 285 | forward 1 | SP |
| 459 | 234568.17 | 1841 | 1933 | forward 2 | SP |
| 459 | 234568.17 | 2059 | 2136 | forward 1 | TM |
| 459 | 234568.17 | 208 | 291 | forward 1 | SP |
| 462 | 243103.24 | 164 | 241 | forward 2 | SP |
| 462 | 243103.24 | 588 | 674 | forward 3 | SP |
| 463 | 469883.1 | 2657 | 2734 | forward 2 | SP |
| 463 | 469883.1 | 4492 | 4572 | forward 1 | SP |
| 463 | 469883.1 | 4587 | 4670 | forward 3 | SP |
| 463 | 469883.1 | 1198 | 1287 | forward 1 | SP |
| 463 | 469883.1 | 1732 | 1821 | forward 1 | SP |
| 463 | 469883.1 | 4352 | 4435 | forward 2 | TM |
| 463 | 469883.1 | 3980 | 4060 | forward 2 | SP |
| 463 | 469883.1 | 2724 | 2813 | forward 3 | SP |
| 463 | 469883.1 | 400 | 486 | forward 1 | SP |
| 465 | 227932.2 | 4290 | 4370 | forward 3 | TM |
| 465 | 227932.2 | 3078 | 3155 | forward 3 | TM |
| 466 | 903691.6 | 195 | 278 | forward 3 | SP |
| 466 | 903691.6 | 2840 | 2929 | forward 2 | SP |
| 468 | 407938.5 | 3676 | 3756 | forward 1 | TM |
| 469 | 233778.1 | 13 | 93 | forward 1 | SP |
| 469 | 233778.1 | 371 | 451 | forward 2 | SP |
| 470 | 474630.19 | 2277 | 2369 | forward 3 | SP |
| 470 | 474630.19 | 156 | 236 | forward 3 | SP |
| 474 | 228860.6 | 1009 | 1098 | forward 1 | SP |
| 477 | 347005.5 | 755 | 844 | forward 2 | SP |
| 477 | 347005.5 | 524 | 607 | forward 2 | TM |
| 477 | 347005.5 | 1931 | 2017 | forward 2 | SP |
| 477 | 347005.5 | 4970 | 5053 | forward 2 | SP |
| 480 | 252570.6c | 215 | 295 | forward 2 | SP |
| 481 | 466402.116 | 1085 | 1177 | forward 2 | SP |
| 483 | 899612.2 | 393 | 479 | forward 3 | SP |
| 484 | 254107.1 | 1087 | 1170 | forward 1 | SP |
| 484 | 254107.1 | 2929 | 3054 | forward 1 | SP |
| 484 | 254107.1 | 3266 | 3349 | forward 2 | SP |
| 485 | 208328.1 | 2434 | 2517 | forward 1 | SP |
| 485 | 208328.1 | 2158 | 2244 | forward 1 | SP |
| 486 | 130157.2 | 1344 | 1421 | forward 3 | TM |
| 486 | 130157.2 | 1994 | 2074 | forward 2 | TM |
| 486 | 130157.2 | 2041 | 2121 | forward 1 | TM |
| 488 | 233089.1 | 1707 | 1787 | forward 3 | TM |
| 489 | 336256.1 | 2057 | 2140 | forward 2 | SP |
| 489 | 336256.1 | 1835 | 1918 | forward 2 | SP |
| 489 | 336256.1 | 3340 | 3420 | forward 1 | TM |
| 489 | 336256.1 | 236 | 319 | forward 2 | SP |
| 490 | 979616.2 | 319 | 393 | forward 1 | TM |
| 491 | 351432.3 | 4887 | 4964 | forward 3 | SP |
| 494 | 481251.3 | 1966 | 2043 | forward 1 | TM |
| 494 | 481251.3 | 1694 | 1774 | forward 2 | SP |
| 494 | 481251.3 | 1825 | 1908 | forward 1 | TM |
| 496 | 96700.1 | 141 | 218 | forward 3 | TM |
| 499 | 344582.19 | 161 | 247 | forward 2 | SP |

[0180] TABLE 4

| SEQ ID NO | TEMPLATE ID | CLONE ID | START | STOP |
|---|---|---|---|---|
| 1 | 441269.2 | 467767H1 | 1083 | 1317 |
| 1 | 441269.2 | 467767R6 | 1083 | 1491 |
| 1 | 441269.2 | 467767T6 | 1523 | 2042 |
| 2 | 3161.5 | 897743R6 | 2385 | 2856 |
| 2 | 3161.5 | 897743H1 | 2385 | 2549 |
| 3 | 977955.7 | 908504T6 | 3163 | 3619 |
| 3 | 977955.7 | 908504H1 | 549 | 748 |
| 3 | 977955.7 | 908504R6 | 549 | 947 |
| 4 | 350754.2 | 981592R6 | 1400 | 1980 |
| 4 | 350754.2 | 981592H1 | 1400 | 1658 |
| 4 | 350754.2 | 981592T6 | 2173 | 2701 |
| 5 | 235191.4 | 1308478H1 | 568 | 829 |
| 5 | 235191.4 | 1308478F6 | 568 | 829 |
| 5 | 235191.4 | 1308478T6 | 570 | 791 |
| 5 | 235191.4 | 1308478R1 | 656 | 844 |
| 6 | 1099593.13 | 1435427F6 | 720 | 1228 |
| 6 | 1099593.13 | 1435427H1 | 720 | 988 |
| 6 | 1099593.13 | 1435427F1 | 720 | 1227 |
| 7 | 1099593.2 | 1435427T6 | 692 | 977 |
| 8 | 003161.7c | 1484773F6 | 270 | 603 |
| 8 | 003161.7c | 1484773T6 | 271 | 578 |
| 8 | 003161.7c | 1484773H1 | 270 | 468 |
| 9 | 415650.5 | 1485735F6 | 80 | 588 |
| 9 | 415650.5 | 1485735H1 | 80 | 337 |
| 10 | 204401.1 | 1485735T6 | 8 | 579 |
| 11 | 347915.14 | 1503076T6 | 4750 | 5381 |
| 11 | 347915.14 | 1503076H1 | 4558 | 4847 |
| 11 | 347915.14 | 1503076F6 | 4558 | 5053 |
| 12 | 997395.1 | 1559836T6 | 2134 | 2777 |
| 12 | 997395.1 | 1559836H1 | 1946 | 2154 |
| 12 | 997395.1 | 1559836F6 | 1946 | 2323 |
| 13 | 332783.1 | 2450712F6 | 1161 | 1558 |
| 13 | 332783.1 | 2450712H1 | 1161 | 1400 |
| 13 | 332783.1 | 1612714F6 | 1653 | 2118 |
| 13 | 332783.1 | 1612714H1 | 1653 | 1866 |
| 13 | 332783.1 | 1612714T6 | 2047 | 2587 |
| 13 | 332783.1 | 2450712T6 | 2156 | 2648 |
| 14 | 422289.1 | 1676442H1 | 1178 | 1414 |
| 14 | 422289.1 | 1676442F6 | 1178 | 1661 |
| 14 | 422289.1 | 1676442T6 | 2168 | 2501 |
| 15 | 899410.5 | 1724967F6 | 920 | 1312 |
| 15 | 899410.5 | 1724967H1 | 1080 | 1312 |
| 16 | 404155.2 | 1724967T6 | 91 | 570 |
| 17 | 412065.22 | 2591494T6 | 1041 | 1681 |
| 17 | 412065.22 | 2591494F6 | 763 | 1349 |
| 17 | 412065.22 | 1737926F6 | 530 | 663 |
| 17 | 412065.22 | 1737926T6 | 1241 | 1679 |
| 18 | 412065.2 | 1737926H1 | 1 | 217 |
| 19 | 345860.21 | 1749417H1 | 309 | 624 |
| 19 | 345860.21 | 1749417F6 | 309 | 772 |
| 19 | 345860.21 | 1749417T6 | 1348 | 1440 |
| 20 | 199101.1 | 1758055H1 | 1553 | 1823 |
| 20 | 199101.1 | 1758055R6 | 1553 | 2065 |
| 20 | 199101.1 | 1758055T6 | 2470 | 2920 |
| 21 | 196606.8c | 1806542H1 | 2386 | 2681 |
| 21 | 196606.8c | 1806542F6 | 2116 | 2681 |
| 21 | 196606.8c | 1806542T6 | 289 | 780 |
| 22 | 475146.3 | 1807407T6 | 1489 | 1940 |
| 22 | 475146.3 | 1807407F6 | 466 | 1006 |
| 22 | 475146.3 | 1807407H1 | 466 | 714 |
| 23 | 474069.8 | 1811369H1 | 844 | 1150 |
| 23 | 474069.8 | 1811369F6 | 844 | 1283 |
| 23 | 474069.8 | 1811369T6 | 1722 | 2152 |
| 24 | 255115.2 | 1846973H1 | 865 | 1117 |
| 25 | 255115.4 | 1846973T6 | 1381 | 1829 |
| 26 | 216331.1 | 1869130H1 | 1226 | 1502 |
| 26 | 216331.1 | 1869130F6 | 1226 | 1653 |
| 26 | 216331.1 | 1869130T6 | 1406 | 1976 |
| 27 | 482517.3 | 1880840H1 | 852 | 999 |
| 27 | 482517.3 | 1880840F6 | 852 | 1289 |
| 27 | 482517.3 | 1880840T6 | 1593 | 2091 |
| 28 | 480653.1 | 1901284F6 | 111 | 569 |
| 28 | 480653.1 | 1901284H1 | 111 | 367 |
| 28 | 480653.1 | 1901284T6 | 666 | 1201 |
| 29 | 978047.1 | 1922875T6 | 1398 | 1987 |
| 29 | 978047.1 | 1922875H1 | 846 | 1029 |
| 29 | 978047.1 | 1922875R6 | 847 | 1347 |
| 30 | 330977.1c | 1998075H1 | 821 | 1095 |
| 30 | 330977.1c | 1998075R6 | 706 | 1095 |
| 30 | 330977.1c | 1998075T6 | 676 | 1068 |
| 31 | 343502.9 | 1998428H1 | 617 | 889 |
| 31 | 343502.9 | 1998428R6 | 617 | 1062 |
| 31 | 343502.9 | 1998428T6 | 617 | 974 |
| 32 | 903104.11c | 2054053R6 | 514 | 1051 |
| 32 | 903104.11c | 2054053H1 | 774 | 1051 |
| 33 | 898068.6 | 2054053T6 | 748 | 1276 |
| 34 | 903104.1 | 2263572R6 | 112 | 583 |
| 34 | 903104.1 | 2263572H1 | 95 | 346 |
| 35 | 903104.8 | 2054053CB1 | 2 | 2370 |
| 35 | 903104.8 | 2263572T6 | 1786 | 2241 |
| 36 | 412065.21 | 2591494H1 | 1010 | 1179 |
| 37 | 399067.1 | 2615184CA2 | 1 | 2855 |
| 37 | 399067.1 | 2615184H1 | 1 | 251 |
| 37 | 399067.1 | 2615184F6 | 1 | 380 |
| 37 | 399067.1 | 2615184T6 | 2108 | 2557 |
| 38 | 237709.11 | 2625371F6 | 1145 | 1704 |
| 38 | 237709.11 | 2625371T6 | 1166 | 1788 |
| 39 | 237709.5 | 2625371H1 | 1732 | 2007 |
| 40 | 216437.4 | 2636043CB1 | 98 | 1101 |
| 40 | 216437.4 | 2636043H1 | 998 | 1085 |
| 40 | 216437.4 | 2636043F6 | 492 | 1085 |
| 41 | 255824.52 | 2636043T6 | 1552 | 1836 |
| 42 | 27798.1 | 2653855T6 | 3882 | 4203 |
| 42 | 27798.1 | 2653855H1 | 2809 | 3102 |
| 42 | 27798.1 | 2653855F6 | 2809 | 3399 |
| 43 | 60671.7 | 2676441F6 | 584 | 989 |
| 43 | 60671.7 | 2676441H1 | 584 | 829 |
| 43 | 60671.7 | 2582525T6 | 1814 | 2355 |
| 44 | 376085.9 | 2676441T6 | 1998 | 2206 |
| 45 | 404467.1 | 2715440H1 | 1 | 242 |
| 45 | 404467.1 | 2715440F6 | 1 | 530 |
| 46 | 903508.12 | 2715440T6 | 2750 | 2967 |
| 47 | 334387.1 | 2718810T6 | 2277 | 2764 |
| 47 | 334387.1 | 2718810CB1 | 1 | 2834 |
| 47 | 334387.1 | 2718810F6 | 1239 | 1742 |
| 47 | 334387.1 | 2718810H1 | 1239 | 1496 |
| 48 | 290403.5 | 2839245F6 | 1055 | 1548 |
| 48 | 290403.5 | 2839245H1 | 1055 | 1319 |
| 49 | 391406.5 | 2883195CB1 | 1848 | 2974 |
| 49 | 391406.5 | 2883195F6 | 1912 | 2425 |
| 50 | 391406.24 | 2883195H1 | 4 | 277 |
| 50 | 391406.24 | 2883195T6 | 330 | 925 |
| 51 | 474588.21 | 3070625H1 | 1762 | 2041 |
| 51 | 474588.21 | 3070625F6 | 1761 | 2181 |
| 52 | 124541.1 | 3176339F6 | 3891 | 4412 |
| 52 | 124541.1 | 3176339T6 | 8 | 409 |
| 52 | 124541.1 | 3176339H1 | 3894 | 4135 |
| 53 | 246862.9 | 3206210F6 | 46 | 466 |
| 53 | 246862.9 | 3206210H1 | 46 | 149 |
| 54 | 246862.17 | 3206210T6 | 1519 | 1947 |
| 55 | 13040.1 | 3436305F6 | 106 | 357 |
| 55 | 13040.1 | 3436305H1 | 106 | 219 |
| 56 | 236480.3 | 3436305T6 | 3031 | 3443 |
| 57 | 314831.5 | 135769H1 | 1362 | 1577 |
| 57 | 314831.5 | 135769R6 | 1362 | 1874 |
| 57 | 314831.5 | 135769T6 | 1984 | 2532 |
| 58 | 391940.1 | 343763R6 | 2988 | 3443 |
| 58 | 391940.1 | 343763H1 | 2989 | 3091 |
| 58 | 391940.1 | 343763T6 | 3132 | 3646 |
| 59 | 454958.13 | 591358R1 | 582 | 929 |
| 59 | 454958.13 | 591358H1 | 582 | 729 |
| 59 | 454958.13 | 591358R6 | 582 | 938 |
| 60 | 1090481.2c | 591358T6 | 1 | 252 |
| 61 | 238203.11 | 999864R6 | 4229 | 4728 |
| 61 | 238203.11 | 999864H1 | 4229 | 4313 |
| 61 | 238203.11 | 999864T6 | 4548 | 5093 |
| 62 | 994057.21 | 1749663H1 | 1576 | 1716 |
| 62 | 994057.21 | 1749663F6 | 1576 | 2017 |
| 63 | 346730.5 | 1818365H1 | 548 | 841 |
| 63 | 346730.5 | 1818365F6 | 548 | 1047 |
| 64 | 346730.2c | 1818365T6 | 1 | 563 |
| 65 | 458903.1 | 1962141H1 | 353 | 588 |
| 66 | 482336.2 | 1962141R6 | 907 | 1438 |
| 67 | 482336.14 | 1962141T6 | 1320 | 1926 |
| 68 | 66522.1 | 1965083H1 | 1 | 266 |
| 68 | 66522.1 | 1965083R6 | 1 | 410 |
| 69 | 300294.3 | 1984158H1 | 2131 | 2393 |
| 69 | 300294.3 | 1984158R6 | 2131 | 2454 |
| 69 | 300294.3 | 1984158T6 | 2131 | 2429 |
| 70 | 474372.8 | 1988774R6 | 2510 | 2848 |
| 70 | 474372.8 | 1988774H1 | 2510 | 2780 |
| 71 | 475028.7 | 2057432CB1 | 1 | 2100 |
| 71 | 475028.7 | 2057432H1 | 140 | 427 |
| 71 | 475028.7 | 2057432R6 | 140 | 704 |
| 72 | 481223.3 | 2057432T6 | 2099 | 2683 |
| 73 | 332499.1 | 2123889T6 | 2129 | 2313 |
| 73 | 332499.1 | 2123889F6 | 2129 | 2350 |
| 73 | 332499.1 | 2123889H1 | 2129 | 2350 |
| 74 | 234340.7 | 2189132F6 | 17 | 458 |
| 74 | 234340.7 | 2189132H1 | 17 | 300 |
| 75 | 234340.15c | 2189132T6 | 60 | 513 |
| 76 | 255778.11 | 2374121H1 | 438 | 632 |
| 76 | 255778.11 | 2374121T6 | 1352 | 1841 |
| 76 | 255778.11 | 2374121CB1 | 1 | 958 |
| 76 | 255778.11 | 2374121F6 | 438 | 958 |
| 76 | 255778.11 | 2374121CA2 | 438 | 958 |
| 77 | 317586.1 | 2613155T6 | 1232 | 1666 |
| 77 | 317586.1 | 2613155F6 | 1513 | 1705 |
| 77 | 317586.1 | 2613155H1 | 1531 | 1705 |
| 78 | 1093574.1c | 2648611F6 | 607 | 1089 |
| 78 | 1093574.1c | 2648611H1 | 607 | 841 |
| 79 | 355658.1 | 2648611T6 | 1 | 233 |
| 80 | 201342.4 | 2802809T6 | 2155 | 2700 |
| 80 | 201342.4 | 2802809H1 | 1365 | 1634 |
| 80 | 201342.4 | 2802809F6 | 1365 | 1793 |
| 81 | 204542.1 | 2817637H1 | 2 | 266 |
| 82 | 428742.1 | 2817637T6 | 1 | 339 |
| 83 | 204386.1 | 3296181T6 | 2265 | 2823 |
| 83 | 204386.1 | 3296181H1 | 293 | 493 |
| 83 | 204386.1 | 3296181F6 | 293 | 698 |
| 84 | 335086.1 | 3602403H1 | 3018 | 3210 |
| 84 | 335086.1 | 3602403F6 | 3018 | 3387 |
| 85 | 228302.1 | 3602403T6 | 634 | 706 |
| 86 | 1063057.1 | 4140129T6 | 192 | 718 |
| 86 | 1063057.1 | 4140129H1 | 1 | 295 |
| 86 | 1063057.1 | 4140129F6 | 1 | 450 |
| 87 | 199905.1 | 384911H1 | 1883 | 2162 |
| 87 | 199905.1 | 384911R6 | 1888 | 2281 |
| 88 | 11329.1 | 501563T6 | 404 | 670 |
| 88 | 11329.1 | 501563H1 | 404 | 563 |
| 88 | 11329.1 | 501563R6 | 404 | 707 |
| 89 | 237536.18 | 549297H1 | 735 | 1047 |
| 89 | 237536.18 | 549297R6 | 766 | 1047 |
| 89 | 237536.18 | 549297T6 | 296 | 785 |
| 90 | 330878.6 | 642320R6 | 1556 | 2014 |
| 90 | 330878.6 | 642320H1 | 1556 | 1813 |
| 90 | 330878.6 | 642320T6 | 3156 | 3745 |
| 91 | 331793.11 | 737335CA2 | 112 | 1166 |
| 91 | 331793.11 | 737335H1 | 112 | 339 |
| 91 | 331793.11 | 737335R6 | 112 | 470 |
| 91 | 331793.11 | 737335T6 | 549 | 1116 |
| 92 | 902895.2 | 1234126F1 | 409 | 724 |
| 92 | 902895.2 | 1234126F6 | 409 | 724 |
| 92 | 902895.2 | 1234126H1 | 409 | 660 |
| 92 | 902895.2 | 1234126T6 | 409 | 674 |
| 93 | 7273.1 | 1367516R1 | 91 | 519 |
| 93 | 7273.1 | 1367516H1 | 91 | 228 |
| 93 | 7273.1 | 1367516R6 | 91 | 518 |
| 93 | 7273.1 | 1367516T6 | 171 | 565 |
| 94 | 190771.2 | 1394614F6 | 729 | 1173 |
| 94 | 190771.2 | 1394614H1 | 729 | 996 |
| 94 | 190771.2 | 1394614T6 | 1986 | 2563 |
| 95 | 1095702.14 | 1428779CB1 | 94 | 2366 |
| 95 | 1095702.14 | 1428779H1 | 111 | 360 |
| 95 | 1095702.14 | 1428779F6 | 111 | 406 |
| 96 | 1095702.4c | 1428779T6 | 5160 | 5336 |
| 97 | 977667.1 | 1446659H1 | 537 | 786 |
| 97 | 977667.1 | 1446659F6 | 537 | 979 |
| 97 | 977667.1 | 1446659T6 | 32 | 96 |
| 98 | 253534.14 | 1450849T6 | 1 | 417 |
| 98 | 253534.14 | 1450849H1 | 1 | 135 |
| 98 | 253534.14 | 1450849F6 | 1 | 443 |
| 98 | 253534.14 | 1450849H6 | 1 | 218 |
| 99 | 1136709.5 | 1488704H1 | 1 | 199 |
| 99 | 1136709.5 | 1488704CA2 | 1 | 768 |
| 99 | 1136709.5 | 1488704F6 | 1 | 511 |
| 100 | 1136709.6 | 1488704T6 | 116 | 578 |
| 101 | 382293.16 | 1599046H1 | 258 | 475 |
| 101 | 382293.16 | 1599046F6 | 258 | 655 |
| 102 | 382293.15 | 1599046T6 | 2489 | 2898 |
| 103 | 235943.39c | 1603809F6 | 2213 | 2678 |
| 103 | 235943.39c | 1603809CA2 | 1307 | 2678 |
| 104 | 235943.36 | 1603809H1 | 4 | 224 |
| 105 | 401434.1 | 1610682T6 | 1024 | 1310 |
| 105 | 401434.1 | 1610682H1 | 1031 | 1225 |
| 105 | 401434.1 | 1610682F6 | 1031 | 1351 |
| 106 | 234107.2 | 1615959T6 | 1788 | 2370 |
| 106 | 234107.2 | 1615959H1 | 695 | 885 |
| 106 | 234107.2 | 1615959F6 | 695 | 1056 |
| 107 | 233660.2c | 1626152F6 | 4392 | 4768 |
| 107 | 233660.2c | 1626152H1 | 4558 | 4768 |
| 107 | 233660.2c | 1626152T6 | 2831 | 3411 |
| 108 | 482423.1 | 1648841H1 | 696 | 856 |
| 108 | 482423.1 | 1648841F6 | 696 | 1033 |
| 109 | 441298.14 | 1676389T6 | 4775 | 5183 |
| 109 | 441298.14 | 1676389H1 | 3121 | 3333 |
| 109 | 441298.14 | 1676389F6 | 3121 | 3619 |
| 110 | 235333.1 | 1684632H1 | 739 | 945 |
| 110 | 235333.1 | 1684632F6 | 739 | 1215 |
| 110 | 235333.1 | 1684632T6 | 835 | 1320 |
| 111 | 221872.11c | 1722234F6 | 799 | 1068 |
| 111 | 221872.11c | 1722234H1 | 860 | 1068 |
| 112 | 992317.12 | 1725322T6 | 864 | 1342 |
| 112 | 992317.12 | 1725322F6 | 866 | 1269 |
| 112 | 992317.12 | 1725322H1 | 866 | 1082 |
| 113 | 230936.6 | 1747818T6 | 1813 | 2350 |
| 113 | 230936.6 | 1747818F6 | 2170 | 2729 |
| 113 | 230936.6 | 1747818H1 | 2462 | 2729 |
| 114 | 029508.1c | 1798468F6 | 97 | 539 |
| 114 | 029508.1c | 1798468H1 | 99 | 370 |
| 115 | 984900.1 | 1802185H1 | 29 | 180 |
| 115 | 984900.1 | 1802185F6 | 29 | 322 |
| 116 | 405158.1 | 1806433F6 | 1972 | 2176 |
| 116 | 405158.1 | 1806433H1 | 2019 | 2240 |
| 116 | 405158.1 | 1806433T6 | 2785 | 3209 |
| 117 | 334177.1 | 1849820H1 | 978 | 1232 |
| 117 | 334177.1 | 1849820F6 | 978 | 1434 |
| 118 | 480187.81 | 1870759CB1 | 1 | 1386 |
| 118 | 480187.81 | 1870759F6 | 36 | 467 |
| 118 | 480187.81 | 1870759H1 | 36 | 299 |
| 119 | 62042.4 | 1979528H1 | 1040 | 1286 |
| 119 | 62042.4 | 1979528R6 | 1040 | 1419 |
| 119 | 62042.4 | 1979528T6 | 1075 | 1534 |
| 120 | 1087696.7 | 2076621H1 | 10 | 273 |
| 120 | 1087696.7 | 2076621F6 | 10 | 428 |
| 121 | 259805.28 | 2076621T6 | 2555 | 2881 |
| 122 | 399128.1 | 2097461H1 | 1 | 225 |
| 122 | 399128.1 | 2097461R6 | 2 | 483 |
| 123 | 986565.15 | 2191455F6 | 603 | 936 |
| 123 | 986565.15 | 2191455H1 | 603 | 853 |
| 123 | 986565.15 | 2191455T6 | 3044 | 3532 |
| 124 | 978378.3 | 2202952H1 | 700 | 934 |
| 124 | 978378.3 | 2202952F6 | 700 | 1002 |
| 125 | 979575.2c | 2243954F6 | 672 | 1113 |
| 125 | 979575.2c | 2243954H1 | 862 | 1113 |
| 126 | 233594.4 | 2264081R6 | 61 | 348 |
| 126 | 233594.4 | 2264081H1 | 61 | 317 |
| 127 | 238635.1 | 2365066H1 | 232 | 464 |
| 127 | 238635.1 | 2365066F6 | 232 | 774 |
| 127 | 238635.1 | 2365066T6 | 466 | 882 |
| 128 | 1080496.1 | 2414663F6 | 599 | 1131 |
| 128 | 1080496.1 | 2414663H1 | 599 | 823 |
| 129 | 351204.2 | 2414663T6 | 702 | 990 |
| 130 | 235394.5 | 2447071F6 | 2469 | 2875 |
| 130 | 235394.5 | 2447071H1 | 2469 | 2686 |
| 131 | 403242.1 | 2500915F6 | 1724 | 2064 |
| 131 | 403242.1 | 2500915H1 | 1724 | 1949 |
| 131 | 403242.1 | 2500915T6 | 1883 | 2304 |
| 132 | 427529.9 | 2504404F6 | 22 | 511 |
| 132 | 427529.9 | 2504404H1 | 22 | 262 |
| 133 | 474868.2 | 2525691T6 | 1904 | 2376 |
| 133 | 474868.2 | 2525691F6 | 95 | 512 |
| 133 | 474868.2 | 2525691H1 | 95 | 360 |
| 133 | 474868.2 | 2525691CA2 | 100 | 2457 |
| 133 | 474868.2 | 2525691CB1 | 102 | 2450 |
| 134 | 1095839.17 | 2541141F6 | 44 | 531 |
| 134 | 1095839.17 | 2541141H1 | 44 | 276 |
| 135 | 1095839.1 | 2541141T6 | 3113 | 3589 |
| 136 | 244251.4 | 2586674T6 | 543 | 974 |
| 136 | 244251.4 | 2586674H1 | 1 | 265 |
| 136 | 244251.4 | 2586674F6 | 1 | 308 |
| 137 | 21555.1 | 2611420H1 | 1 | 251 |
| 137 | 21555.1 | 2611420F6 | 1 | 373 |
| 138 | 234157.3 | 2621425H1 | 939 | 1200 |
| 138 | 234157.3 | 2621425R6 | 939 | 1376 |
| 139 | 903478.1 | 2621425T6 | 1 | 559 |
| 140 | 411296.2 | 2651610T6 | 1667 | 2272 |
| 140 | 411296.2 | 2651610F6 | 1326 | 1846 |
| 140 | 411296.2 | 2651610H1 | 1293 | 1540 |
| 141 | 18044.1 | 2652691F6 | 93 | 574 |
| 141 | 18044.1 | 2652691H1 | 93 | 330 |
| 142 | 407260.2 | 2669708F6 | 768 | 1327 |
| 142 | 407260.2 | 2669708H1 | 768 | 1019 |
| 142 | 407260.2 | 2669708T6 | 906 | 1483 |
| 143 | 978765.2 | 2756450R6 | 1 | 194 |
| 143 | 978765.2 | 2756450T6 | 1 | 156 |
| 144 | 338274.1 | 2830040F6 | 8 | 458 |
| 144 | 338274.1 | 2830040T6 | 1 | 507 |
| 144 | 338274.1 | 2830040H1 | 8 | 265 |
| 145 | 231270.1 | 2905430H1 | 606 | 678 |
| 145 | 231270.1 | 2905430F6 | 606 | 938 |
| 146 | 18092.1 | 2905612H1 | 1 | 190 |
| 146 | 18092.1 | 2905612F6 | 1 | 190 |
| 147 | 404197.8c | 2964015F6 | 16 | 413 |
| 147 | 404197.8c | 2964015H1 | 103 | 413 |
| 148 | 404197.4 | 2964015T6 | 2687 | 3114 |
| 149 | 5460.1 | 3124174T6 | 87 | 566 |
| 149 | 5460.1 | 3124174F6 | 7 | 349 |
| 149 | 5460.1 | 3124174H1 | 7 | 292 |
| 150 | 346511.4 | 3214930F6 | 81 | 650 |
| 151 | 346511.6 | 3214930H2 | 17 | 125 |
| 152 | 331233.2 | 3246843F6 | 1 | 398 |
| 152 | 331233.2 | 3246843H1 | 1 | 231 |
| 153 | 234056.5 | 3561726H1 | 1 | 292 |
| 153 | 234056.5 | 3561726F6 | 1 | 402 |
| 154 | 238118.1 | 220964T6 | 710 | 871 |
| 154 | 238118.1 | 220964H1 | 710 | 912 |
| 154 | 238118.1 | 220964R6 | 710 | 912 |
| 155 | 233596.5 | 1368493R6 | 692 | 1056 |
| 155 | 233596.5 | 1368493T6 | 692 | 1015 |
| 155 | 233596.5 | 1368493T1 | 692 | 1013 |
| 155 | 233596.5 | 1368493H1 | 692 | 924 |
| 156 | 988653.1 | 1705208H1 | 1702 | 1906 |
| 156 | 988653.1 | 1705208F6 | 1702 | 2278 |
| 156 | 988653.1 | 1705208T6 | 1755 | 2382 |
| 157 | 470468.26 | 1806435CB1 | 486 | 1870 |
| 157 | 470468.26 | 1806435F6 | 800 | 1331 |
| 157 | 470468.26 | 1806435H1 | 800 | 1063 |
| 158 | 470468.25 | 1806435T6 | 293 | 806 |
| 159 | 903479.3 | 2013450R6 | 1591 | 1828 |
| 159 | 903479.3 | 2013450H1 | 1591 | 1828 |
| 159 | 903479.3 | 2013450T6 | 1591 | 1786 |
| 160 | 267918.1 | 2275616R6 | 659 | 1034 |
| 160 | 267918.1 | 2275616H1 | 659 | 932 |
| 160 | 267918.1 | 2275616T6 | 659 | 992 |
| 161 | 1094412.1 | 2641522CA2 | 6 | 2512 |
| 162 | 1094107.1 | 2641522T6 | 2095 | 2480 |
| 162 | 1094107.1 | 2641522H1 | 3 | 188 |
| 162 | 1094107.1 | 2641522F6 | 3 | 445 |
| 163 | 218452.4 | 3013646H1 | 3470 | 3750 |
| 163 | 218452.4 | 3013646F6 | 3470 | 3957 |
| 163 | 218452.4 | 3013646T6 | 3795 | 4216 |
| 164 | 12178.2 | 014034H1 | 564 | 839 |
| 165 | 100653.3 | 025818H1 | 431 | 632 |
| 166 | 978478.4 | 041692H1 | 494 | 741 |
| 166 | 978478.4 | 041692R6 | 494 | 831 |
| 167 | 85942.2 | 109658R6 | 44 | 521 |
| 168 | 85942.3 | 109658T6 | 416 | 986 |
| 169 | 977470.16c | 155890T6 | 64 | 477 |
| 169 | 977470.16c | 155890H1 | 1926 | 2123 |
| 169 | 977470.16c | 155890R6 | 1785 | 2123 |
| 170 | 283762.2 | 156350R6 | 1538 | 1813 |
| 170 | 283762.2 | 156350H1 | 1538 | 1713 |
| 171 | 331065.2 | 162793H1 | 1798 | 2217 |
| 172 | 331065.5 | 162793R6 | 1666 | 2059 |
| 173 | 252782.4 | 162793T6 | 2178 | 2789 |
| 174 | 229068.1 | 197779R6 | 359 | 821 |
| 174 | 229068.1 | 197779H1 | 359 | 584 |
| 174 | 229068.1 | 197779T6 | 745 | 1317 |
| 175 | 407450.7 | 275683R6 | 188 | 447 |
| 175 | 407450.7 | 275683H1 | 188 | 432 |
| 175 | 407450.7 | 275683T6 | 280 | 877 |
| 176 | 200163.2 | 348429R6 | 437 | 979 |
| 176 | 200163.2 | 348429R1 | 437 | 917 |
| 176 | 200163.2 | 348429F1 | 915 | 1497 |
| 176 | 200163.2 | 348429T7 | 948 | 1459 |
| 176 | 200163.2 | 348429T6 | 1248 | 1454 |
| 177 | 200163.12c | 348429CB1 | 7 | 1801 |
| 177 | 200163.12c | 348429H1 | 171 | 401 |
| 178 | 1328237.4 | 452790T7 | 2338 | 2685 |
| 178 | 1328237.4 | 452790R6 | 976 | 1423 |
| 178 | 1328237.4 | 452790H1 | 976 | 1211 |
| 178 | 1328237.4 | 452790R7 | 976 | 1406 |
| 179 | 333965.1 | 452790T6 | 1905 | 2426 |
| 180 | 1328236.5 | 515029H1 | 847 | 1071 |
| 180 | 1328236.5 | 515029R6 | 597 | 1070 |
| 180 | 1328236.5 | 515029T6 | 169 | 776 |
| 181 | 995534.3 | 546656H1 | 1514 | 1803 |
| 181 | 995534.3 | 546656R6 | 1514 | 1973 |
| 181 | 995534.3 | 546656T6 | 2012 | 2433 |
| 181 | 995534.3 | 546656CB1 | 70 | 4457 |
| 182 | 1098887.1 | 569710R1 | 191 | 728 |
| 182 | 1098887.1 | 2317772T6 | 922 | 1262 |
| 182 | 1098887.1 | 569710H1 | 190 | 439 |
| 182 | 1098887.1 | 569710R6 | 190 | 729 |
| 182 | 1098887.1 | 569710CB1 | 1 | 1309 |
| 182 | 1098887.1 | 569710CA2 | 191 | 1323 |
| 182 | 1098887.1 | 2317772H1 | 511 | 765 |
| 182 | 1098887.1 | 2317772R6 | 511 | 987 |
| 182 | 1098887.1 | 569710F1 | 691 | 1309 |
| 182 | 1098887.1 | 569710T6 | 813 | 1271 |
| 183 | 268733.1 | 586337H1 | 1 | 239 |
| 183 | 268733.1 | 586337R6 | 1 | 239 |
| 184 | 470023.2 | 610280R6 | 292 | 808 |
| 184 | 470023.2 | 610280H1 | 292 | 563 |
| 185 | 989966.8 | 610280T6 | 1955 | 2086 |
| 186 | 233925.5 | 637639R6 | 833 | 1195 |
| 186 | 233925.5 | 637639H1 | 833 | 1089 |
| 186 | 233925.5 | 637639T6 | 1079 | 1694 |
| 187 | 405145.5 | 855379R1 | 7249 | 7460 |
| 187 | 405145.5 | 855379R6 | 7249 | 7460 |
| 187 | 405145.5 | 855379H1 | 7249 | 7460 |
| 188 | 261982.8 | 1234054CB1 | 698 | 8277 |
| 188 | 261982.8 | 4106629F6 | 992 | 1484 |
| 188 | 261982.8 | 4106629H1 | 994 | 1275 |
| 188 | 261982.8 | 4106629T6 | 2457 | 2747 |
| 188 | 261982.8 | 1234054H1 | 5894 | 6152 |
| 188 | 261982.8 | 1234054F6 | 5894 | 6249 |
| 188 | 261982.8 | 1234054T6 | 6312 | 6832 |
| 189 | 246285.1 | 1275388F6 | 230 | 676 |
| 189 | 246285.1 | 1275388H1 | 230 | 447 |
| 189 | 246285.1 | 1275388T6 | 1699 | 2143 |
| 190 | 228511.1 | 1283340H1 | 3122 | 3366 |
| 190 | 228511.1 | 1283340F6 | 3122 | 3523 |
| 190 | 228511.1 | 1283340T6 | 3719 | 4120 |
| 191 | 40290.1 | 1289539H1 | 754 | 897 |
| 191 | 40290.1 | 1289539F6 | 754 | 981 |
| 191 | 40290.1 | 1289539T6 | 761 | 939 |
| 192 | 399465.3 | 1297406H1 | 1504 | 1749 |
| 192 | 399465.3 | 1297406F1 | 1504 | 1997 |
| 192 | 399465.3 | 1297406F6 | 1504 | 1998 |
| 192 | 399465.3 | 1297406T6 | 3822 | 4041 |
| 193 | 898850.21 | 1307776F6 | 442 | 738 |
| 193 | 898850.21 | 1307776H1 | 501 | 738 |
| 194 | 201356.1 | 1316173T6 | 2198 | 2684 |
| 194 | 201356.1 | 1316173F6 | 429 | 859 |
| 194 | 201356.1 | 1316173H1 | 429 | 685 |
| 195 | 223285.1 | 1362803H1 | 101 | 350 |
| 195 | 223285.1 | 1362803F6 | 101 | 532 |
| 195 | 223285.1 | 1362803F1 | 101 | 550 |
| 196 | 318000.4 | 1382007CA2 | 79 | 1133 |
| 196 | 318000.4 | 1382007F6 | 79 | 516 |
| 196 | 318000.4 | 1382007H1 | 79 | 342 |
| 196 | 318000.4 | 1382007T6 | 574 | 1103 |
| 197 | 977887.1 | 1416679CB1 | 442 | 4897 |
| 197 | 977887.1 | 1416679H1 | 4021 | 4259 |
| 197 | 977887.1 | 1416679F6 | 4021 | 4331 |
| 197 | 977887.1 | 1416679T6 | 4324 | 4837 |
| 198 | 1094199.1 | 1441706F6 | 6769 | 7116 |
| 199 | 1094984.12 | 1441706H1 | 1 | 271 |
| 200 | 244785.3 | 1441706T6 | 1790 | 1857 |
| 201 | 242278.1c | 1445226H1 | 278 | 525 |
| 201 | 242278.1c | 1445226F6 | 278 | 749 |
| 202 | 113621.5 | 1445226T6 | 2851 | 3328 |
| 203 | 401532.2 | 1456482F6 | 5517 | 5677 |
| 203 | 401532.2 | 1456482H1 | 5517 | 5688 |
| 203 | 401532.2 | 1456482T6 | 5518 | 5651 |
| 204 | 006985.1c | 1474660R6 | 437 | 628 |
| 204 | 006985.1c | 1474660H1 | 431 | 628 |
| 204 | 006985.1c | 1474660T6 | 463 | 628 |
| 205 | 351209.14 | 1486467H1 | 1 | 299 |
| 205 | 351209.14 | 1486467F6 | 1 | 509 |
| 206 | 351209.16 | 1486467T6 | 2094 | 2432 |
| 207 | 475819.14 | 1488957T6 | 1989 | 2273 |
| 207 | 475819.14 | 1488957F6 | 1996 | 2319 |
| 207 | 475819.14 | 1488957H1 | 1996 | 2214 |
| 208 | 241384.3 | 1551017T6 | 1850 | 2384 |
| 208 | 241384.3 | 1551017R6 | 31 | 370 |
| 208 | 241384.3 | 1551017H1 | 31 | 233 |
| 209 | 3428.1 | 1560819H1 | 117 | 320 |
| 209 | 3428.1 | 1560819F6 | 117 | 383 |
| 209 | 3428.1 | 1560819T6 | 174 | 382 |
| 210 | 244200.1 | 1599154F6 | 1619 | 2129 |
| 210 | 244200.1 | 1599154H1 | 1619 | 1804 |
| 210 | 244200.1 | 1599154T6 | 2329 | 2722 |
| 211 | 412484.3 | 1600612F6 | 59 | 401 |
| 211 | 412484.3 | 1600612H1 | 59 | 273 |
| 212 | 412484.8 | 1600612T6 | 679 | 1148 |
| 213 | 402187.16 | 1607765F6 | 1033 | 1401 |
| 213 | 402187.16 | 1607765H1 | 1033 | 1239 |
| 213 | 402187.16 | 1607765T6 | 1047 | 1370 |
| 214 | 903091.31 | 1618369CA2 | 145 | 1709 |
| 215 | 903091.33c | 1618369F6 | 2363 | 2905 |
| 215 | 903091.33c | 1618369CB1 | 754 | 2904 |
| 216 | 903091.16 | 1618369H1 | 1 | 219 |
| 217 | 228447.29c | 1639231F6 | 1 | 230 |
| 217 | 228447.29c | 1639231H1 | 1 | 201 |
| 218 | 475473.1 | 1649906H1 | 1155 | 1354 |
| 218 | 475473.1 | 1649906F6 | 1155 | 1543 |
| 219 | 354430.4 | 1661486F6 | 3990 | 4349 |
| 219 | 354430.4 | 1661486H1 | 3990 | 4201 |
| 219 | 354430.4 | 1661486T6 | 6224 | 6432 |
| 220 | 468221.12c | 1662856F6 | 257 | 765 |
| 220 | 468221.12c | 1662856H1 | 257 | 484 |
| 221 | 468221.13 | 1662856T6 | 992 | 1313 |
| 222 | 399187.1c | 1669720F6 | 1 | 398 |
| 222 | 399187.1c | 1669720H1 | 300 | 398 |
| 223 | 903338.12 | 1669720T6 | 157 | 508 |
| 224 | 208529.1 | 1676657T6 | 720 | 1170 |
| 224 | 208529.1 | 1676657F6 | 524 | 900 |
| 224 | 208529.1 | 1676657H1 | 524 | 767 |
| 225 | 1040667.52 | 1684010H1 | 482 | 696 |
| 225 | 1040667.52 | 1684010F6 | 482 | 962 |
| 226 | 147665.1 | 1709754H1 | 492 | 706 |
| 226 | 147665.1 | 1709754F6 | 492 | 787 |
| 226 | 147665.1 | 1709754T6 | 492 | 749 |
| 227 | 218524.4 | 1715437F6 | 1103 | 1570 |
| 227 | 218524.4 | 1715437H1 | 1103 | 1373 |
| 227 | 218524.4 | 1715437T6 | 1352 | 1767 |
| 228 | 346673.1 | 1724856F6 | 2244 | 2611 |
| 228 | 346673.1 | 1724856H1 | 2244 | 2451 |
| 228 | 346673.1 | 1842015H1 | 2744 | 2937 |
| 228 | 346673.1 | 1842015R6 | 2744 | 3100 |
| 228 | 346673.1 | 1724856T6 | 2888 | 3065 |
| 228 | 346673.1 | 1842015T6 | 2959 | 3056 |
| 229 | 58775.1 | 1734355T6 | 1173 | 1562 |
| 229 | 58775.1 | 1734355H1 | 469 | 687 |
| 229 | 58775.1 | 1734355F6 | 469 | 784 |
| 230 | 197086.1 | 1807312F6 | 2059 | 2386 |
| 230 | 197086.1 | 1807312H1 | 2059 | 2338 |
| 230 | 197086.1 | 1807312T6 | 2317 | 2846 |
| 231 | 348143.7 | 1818111CB1 | 1 | 2418 |
| 231 | 348143.7 | 1818111F6 | 153 | 519 |
| 231 | 348143.7 | 1818111H1 | 153 | 414 |
| 232 | 239552.3c | 1831470F6 | 300 | 792 |
| 232 | 239552.3c | 1831470H1 | 676 | 792 |
| 232 | 239552.3c | 1831470T6 | 60 | 245 |
| 233 | 233003.6 | 1834236R6 | 276 | 838 |
| 233 | 233003.6 | 1834236H1 | 276 | 565 |
| 234 | 233003.2 | 1834236T6 | 1 | 552 |
| 235 | 217860.1 | 1843153T6 | 2420 | 2968 |
| 235 | 217860.1 | 1843153H1 | 1269 | 1559 |
| 235 | 217860.1 | 1843153R6 | 1269 | 1531 |
| 236 | 216189.2 | 1859548T6 | 1716 | 2195 |
| 236 | 216189.2 | 1859548F6 | 1261 | 1721 |
| 236 | 216189.2 | 1859548H1 | 1261 | 1521 |
| 237 | 343692.15c | 1869342H1 | 3225 | 3468 |
| 237 | 343692.15c | 1869342F6 | 3018 | 3468 |
| 238 | 382906.16 | 1874037F6 | 54 | 505 |
| 238 | 382906.16 | 1874037H1 | 54 | 289 |
| 239 | 482325.15 | 1877064T6 | 1857 | 2050 |
| 239 | 482325.15 | 1877064H1 | 1864 | 2088 |
| 239 | 482325.15 | 1877064F6 | 1864 | 2090 |
| 240 | 64851.1 | 1903544H1 | 142 | 264 |
| 240 | 64851.1 | 1903544F6 | 142 | 264 |
| 241 | 346016.5 | 1907660F6 | 6 | 527 |
| 241 | 346016.5 | 1907660T6 | 116 | 541 |
| 242 | 346016.6 | 1907660H1 | 26 | 296 |
| 243 | 222222.1 | 1911126H1 | 99 | 258 |
| 243 | 222222.1 | 1911126F6 | 99 | 476 |
| 244 | 413835.5 | 1968816R6 | 3431 | 3682 |
| 244 | 413835.5 | 1968816H1 | 3431 | 3579 |
| 244 | 413835.5 | 1968816T6 | 3431 | 3633 |
| 245 | 978273.4 | 1975523H1 | 1527 | 1794 |
| 245 | 978273.4 | 1975523F6 | 1527 | 1787 |
| 245 | 978273.4 | 1975523T6 | 1536 | 1777 |
| 246 | 474673.1 | 1989435CB1 | 176 | 5407 |
| 246 | 474673.1 | 1989435H1 | 1973 | 2208 |
| 246 | 474673.1 | 1989435F6 | 1973 | 2393 |
| 246 | 474673.1 | 1989435T6 | 3111 | 3690 |
| 247 | 480286.1 | 2044967F6 | 807 | 1062 |
| 248 | 402640.1 | 2044967H1 | 777 | 1036 |
| 249 | 232218.1 | 2070055F6 | 1 | 422 |
| 249 | 232218.1 | 2070055H1 | 1 | 275 |
| 249 | 232218.1 | 2070055T6 | 1292 | 1649 |
| 250 | 981919.1c | 2136337F6 | 1 | 267 |
| 250 | 981919.1c | 2136337T6 | 6 | 256 |
| 250 | 981919.1c | 2136337H1 | 1 | 77 |
| 251 | 229369.1 | 2151736F6 | 155 | 527 |
| 251 | 229369.1 | 2151736H1 | 155 | 399 |
| 251 | 229369.1 | 2151736T6 | 363 | 931 |
| 252 | 253946.17 | 2172334CB1 | 208 | 3544 |
| 252 | 253946.17 | 2172334F6 | 1163 | 1711 |
| 252 | 253946.17 | 2172334H1 | 1163 | 1418 |
| 252 | 253946.17 | 2172334T6 | 1891 | 2457 |
| 253 | 13550.1 | 2190842CB1 | 63 | 584 |
| 253 | 13550.1 | 2190842F6 | 155 | 579 |
| 253 | 13550.1 | 2190842H1 | 155 | 325 |
| 253 | 13550.1 | 2190842T6 | 207 | 537 |
| 254 | 997704.1 | 2191181H1 | 856 | 1086 |
| 254 | 997704.1 | 2191181F6 | 856 | 1089 |
| 254 | 997704.1 | 2191181T6 | 860 | 1044 |
| 255 | 385608.45 | 2219234F6 | 878 | 1327 |
| 256 | 385608.25c | 2219234H1 | 682 | 935 |
| 257 | 385608.3 | 2219234T6 | 3156 | 3676 |
| 258 | 78434.1 | 2308788T6 | 1 | 141 |
| 258 | 78434.1 | 2308788R6 | 1 | 183 |
| 258 | 78434.1 | 2308788H1 | 1 | 193 |
| 259 | 243134.1 | 2355979T6 | 5 | 298 |
| 259 | 243134.1 | 2355979F6 | 9 | 304 |
| 259 | 243134.1 | 2355979H1 | 80 | 304 |
| 260 | 196959.4c | 2358377CB1 | 1222 | 3902 |
| 260 | 196959.4c | 2358377R6 | 3476 | 3902 |
| 260 | 196959.4c | 2358377H1 | 3676 | 3902 |
| 261 | 82168.5 | 2450092F6 | 1 | 441 |
| 261 | 82168.5 | 2450092H1 | 1 | 221 |
| 262 | 4360.1 | 2458924F6 | 172 | 614 |
| 262 | 4360.1 | 2458924H1 | 172 | 402 |
| 262 | 4360.1 | 2458924T6 | 549 | 951 |
| 263 | 412661.2 | 2470485F6 | 481 | 1054 |
| 263 | 412661.2 | 2470485H1 | 481 | 732 |
| 263 | 412661.2 | 172023R6 | 7002 | 7403 |
| 263 | 412661.2 | 172023H1 | 7002 | 7190 |
| 264 | 206310.2 | 2486065H1 | 1747 | 1973 |
| 264 | 206310.2 | 2486065F6 | 1747 | 1836 |
| 265 | 346599.14c | 2515389F6 | 726 | 1170 |
| 265 | 346599.14c | 2515389H1 | 845 | 1170 |
| 266 | 385608.47 | 2520418F6 | 309 | 681 |
| 267 | 385608.2 | 2520418CB1 | 1340 | 4480 |
| 267 | 385608.2 | 2520418H1 | 1330 | 1618 |
| 268 | 335202.1 | 2530672T6 | 438 | 549 |
| 268 | 335202.1 | 2530672F6 | 445 | 719 |
| 268 | 335202.1 | 2530672H1 | 445 | 702 |
| 269 | 978402.3 | 2553094H1 | 263 | 505 |
| 269 | 978402.3 | 2553094F6 | 263 | 605 |
| 270 | 232146.1 | 2578906T6 | 2675 | 2967 |
| 270 | 232146.1 | 2578906H1 | 381 | 624 |
| 270 | 232146.1 | 2578906F6 | 381 | 798 |
| 271 | 25757.1 | 2588149F6 | 110 | 371 |
| 271 | 25757.1 | 2588149H1 | 110 | 340 |
| 271 | 25757.1 | 2588149T6 | 110 | 329 |
| 272 | 206860.2 | 2589404F6 | 1 | 199 |
| 272 | 206860.2 | 2589404H1 | 1 | 199 |
| 272 | 206860.2 | 2589404T6 | 25 | 199 |
| 273 | 239797.3 | 2598317F6 | 656 | 1017 |
| 273 | 239797.3 | 2598317H1 | 656 | 903 |
| 273 | 239797.3 | 2598317T6 | 664 | 984 |
| 274 | 441328.12 | 2601777F6 | 2979 | 3491 |
| 274 | 441328.12 | 2601777H1 | 2979 | 3262 |
| 274 | 441328.12 | 2601777T6 | 2972 | 3454 |
| 275 | 113975.1 | 2628789F6 | 1 | 318 |
| 275 | 113975.1 | 2628789H1 | 1 | 229 |
| 275 | 113975.1 | 2628789T6 | 179 | 507 |
| 276 | 427554.6 | 2646362CB1 | 232 | 936 |
| 276 | 427554.6 | 2646362F6 | 284 | 674 |
| 276 | 427554.6 | 2646362CA2 | 284 | 754 |
| 276 | 427554.6 | 2646362H1 | 284 | 536 |
| 277 | 360130.31c | 2646362T6 | 18 | 523 |
| 278 | 82154.23 | 2651158F6 | 139 | 370 |
| 279 | 82154.24 | 2651158H1 | 2386 | 2546 |
| 280 | 1137293.16 | 2651158T6 | 2341 | 2532 |
| 281 | 994468.3 | 2656117F6 | 704 | 1208 |
| 281 | 994468.3 | 2656117H1 | 705 | 919 |
| 282 | 994532.1 | 2656117T6 | 323 | 701 |
| 283 | 90710.1 | 2662470F6 | 1 | 343 |
| 283 | 90710.1 | 2662470H1 | 1 | 248 |
| 284 | 304359.1c | 2662470T6 | 227 | 587 |
| 285 | 12402.1 | 2703241H1 | 1 | 96 |
| 285 | 12402.1 | 2703241F6 | 1 | 95 |
| 285 | 12402.1 | 2703241T6 | 1 | 55 |
| 286 | 92743.1 | 2703930F6 | 1 | 386 |
| 286 | 92743.1 | 2703930H1 | 1 | 264 |
| 286 | 92743.1 | 2703930T6 | 260 | 586 |
| 287 | 18513.1 | 2704425H1 | 1 | 100 |
| 287 | 18513.1 | 2704425F6 | 1 | 273 |
| 287 | 18513.1 | 2704425T6 | 4 | 425 |
| 288 | 477387.7 | 2747525T6 | 751 | 1255 |
| 288 | 477387.7 | 2747525F6 | 394 | 931 |
| 288 | 477387.7 | 2747525H1 | 394 | 602 |
| 289 | 350440.14c | 2753673H1 | 2861 | 3132 |
| 290 | 350440.15 | 2753673R6 | 1742 | 2190 |
| 291 | 992455.56c | 2762278H1 | 2280 | 2516 |
| 291 | 992455.56c | 2762278F6 | 2097 | 2516 |
| 291 | 992455.56c | 2762278T6 | 430 | 921 |
| 292 | 997395.4 | 2783496T6 | 938 | 1203 |
| 292 | 997395.4 | 2783496H2 | 945 | 1200 |
| 292 | 997395.4 | 2783496F6 | 945 | 1241 |
| 293 | 17821.1 | 2784511H1 | 1 | 218 |
| 293 | 17821.1 | 2784511F6 | 1 | 218 |
| 294 | 201436.4c | 2790307H2 | 857 | 1168 |
| 294 | 201436.4c | 2790307F6 | 688 | 1167 |
| 295 | 201436.3 | 2790307T6 | 1668 | 1994 |
| 296 | 198947.1 | 2817268CB1 | 53 | 1362 |
| 296 | 198947.1 | 2817268F6 | 94 | 568 |
| 296 | 198947.1 | 2817268H1 | 94 | 334 |
| 297 | 1135407.1c | 2817931T6 | 42 | 244 |
| 297 | 1135407.1c | 2817931F6 | 7 | 480 |
| 297 | 1135407.1c | 2817931H1 | 252 | 477 |
| 298 | 200046.1 | 2822608F6 | 58 | 298 |
| 298 | 200046.1 | 2822608H1 | 58 | 345 |
| 299 | 981489.1 | 2822608T6 | 1473 | 1869 |
| 300 | 19362.1 | 2825842F6 | 1 | 307 |
| 300 | 19362.1 | 2825842H1 | 1 | 287 |
| 300 | 19362.1 | 2825842T6 | 2 | 267 |
| 301 | 217116.1 | 2829340H1 | 67 | 333 |
| 301 | 217116.1 | 2829340F6 | 67 | 518 |
| 302 | 330530.1 | 2829340T6 | 8 | 320 |
| 303 | 401213.1 | 2854504F6 | 1050 | 1230 |
| 303 | 401213.1 | 2854504H1 | 1050 | 1230 |
| 303 | 401213.1 | 2854504T6 | 1051 | 1191 |
| 304 | 400280.3 | 2882960H1 | 3152 | 3432 |
| 304 | 400280.3 | 2882960F6 | 3152 | 3529 |
| 305 | 17320.1 | 2886757CB1 | 367 | 1412 |
| 305 | 17320.1 | 2886757H1 | 920 | 1177 |
| 305 | 17320.1 | 2886757F6 | 920 | 1397 |
| 306 | 406182.1c | 2889062F6 | 27 | 429 |
| 306 | 406182.1c | 2889062H1 | 345 | 429 |
| 306 | 406182.1c | 2889062T6 | 1 | 305 |
| 307 | 244603.1 | 2893953F6 | 100 | 569 |
| 307 | 244603.1 | 2893953H1 | 101 | 387 |
| 308 | 107405.1 | 2952116H1 | 176 | 401 |
| 308 | 107405.1 | 2952116F6 | 176 | 452 |
| 309 | 337024.4 | 2962332F6 | 1 | 484 |
| 309 | 337024.4 | 2962332H1 | 2 | 304 |
| 310 | 337024.3 | 2962332T6 | 2194 | 2334 |
| 311 | 481848.1c | 2963871CB1 | 1 | 2455 |
| 311 | 481848.1c | 2963871F6 | 1250 | 1727 |
| 311 | 481848.1c | 2963871H1 | 1428 | 1726 |
| 312 | 208723.1 | 2991483T6 | 1 | 184 |
| 312 | 208723.1 | 2991483F6 | 1 | 210 |
| 312 | 208723.1 | 2991483H1 | 1 | 167 |
| 313 | 64612.1 | 3026161H1 | 1584 | 1857 |
| 313 | 64612.1 | 3026161F6 | 1584 | 1941 |
| 314 | 978402.1 | 3031883F6 | 2697 | 3018 |
| 314 | 978402.1 | 3031883H1 | 2697 | 2985 |
| 315 | 453369.8 | 3032715F6 | 508 | 764 |
| 315 | 453369.8 | 3032715H1 | 511 | 764 |
| 315 | 453369.8 | 3032715T6 | 556 | 771 |
| 316 | 27240.1 | 3037826H1 | 6 | 250 |
| 316 | 27240.1 | 3037826F6 | 6 | 286 |
| 317 | 401290.1c | 3037826T6 | 176 | 424 |
| 318 | 481847.1 | 3075694F6 | 13 | 350 |
| 318 | 481847.1 | 3075694H1 | 13 | 267 |
| 319 | 235636.1 | 3075694T6 | 2259 | 2718 |
| 320 | 994057.7 | 3123879T6 | 684 | 920 |
| 320 | 994057.7 | 3123879H1 | 691 | 956 |
| 320 | 994057.7 | 3123879F6 | 691 | 956 |
| 321 | 405559.1 | 3268843F6 | 1 | 464 |
| 321 | 405559.1 | 3268843H1 | 2 | 240 |
| 322 | 16760.1 | 3268843T6 | 1 | 433 |
| 323 | 198522.1 | 3278190F6 | 798 | 1015 |
| 323 | 198522.1 | 3278190H1 | 800 | 1019 |
| 323 | 198522.1 | 3278190T6 | 799 | 975 |
| 324 | 19366.1 | 3296544F6 | 44 | 650 |
| 324 | 19366.1 | 3296544H1 | 44 | 273 |
| 325 | 002679.7c | 3377371F6 | 1 | 518 |
| 325 | 002679.7c | 3377371H1 | 1 | 258 |
| 326 | 208276.1 | 3396772F6 | 126 | 478 |
| 326 | 208276.1 | 3396772H1 | 126 | 365 |
| 326 | 208276.1 | 3396772T6 | 325 | 557 |
| 327 | 21552.1 | 3493669F6 | 87 | 390 |
| 327 | 21552.1 | 3493669H1 | 89 | 350 |
| 328 | 198087.1 | 3594344T6 | 1147 | 1576 |
| 328 | 198087.1 | 3594344F6 | 628 | 1071 |
| 328 | 198087.1 | 3594344H1 | 629 | 923 |
| 329 | 903269.4 | 3616229T6 | 7273 | 7724 |
| 329 | 903269.4 | 3616229F6 | 2912 | 3371 |
| 329 | 903269.4 | 3616229H1 | 2912 | 3215 |
| 330 | 351166.1 | 3624110H1 | 618 | 730 |
| 330 | 351166.1 | 3624110F6 | 619 | 730 |
| 331 | 344713.3 | 3838748H1 | 50 | 282 |
| 331 | 344713.3 | 3838748F6 | 50 | 466 |
| 331 | 344713.3 | 3838748T6 | 63 | 269 |
| 332 | 167920.1 | 4043301F6 | 97 | 435 |
| 332 | 167920.1 | 4043301H1 | 98 | 246 |
| 333 | 433569.1 | 4051491H1 | 982 | 1248 |
| 333 | 433569.1 | 4051491F6 | 982 | 1601 |
| 333 | 433569.1 | 4051491T6 | 1341 | 1922 |
| 334 | 406365.1 | 4082055F6 | 1 | 276 |
| 334 | 406365.1 | 4082055H1 | 1 | 14 |
| 334 | 406365.1 | 4082055T6 | 207 | 702 |
| 335 | 348121.9 | 4107595F6 | 1952 | 2416 |
| 335 | 348121.9 | 4107595H1 | 1953 | 2205 |
| 336 | 363585.1c | 4190635F6 | 203 | 553 |
| 336 | 363585.1c | 4190635H1 | 314 | 553 |
| 337 | 408116.1 | 4190635T6 | 2 | 145 |
| 338 | 339737.1c | 4252048F6 | 1 | 384 |
| 338 | 339737.1c | 4252048H1 | 146 | 384 |
| 339 | 978146.1 | 4416082H1 | 436 | 673 |
| 339 | 978146.1 | 4416082F6 | 436 | 735 |
| 339 | 978146.1 | 4416082T6 | 512 | 735 |
| 340 | 186012.1 | 4641887F6 | 410 | 697 |
| 340 | 186012.1 | 4641887H1 | 411 | 639 |
| 341 | 405041.1 | 4754771F6 | 411 | 855 |
| 341 | 405041.1 | 4754771H1 | 411 | 679 |
| 342 | 474266.2 | 4754771T6 | 1928 | 2239 |
| 343 | 401530.2 | 4765137H1 | 384 | 643 |
| 343 | 401530.2 | 4765137F6 | 385 | 685 |
| 344 | 234729.11 | 4765137T6 | 433 | 607 |
| 345 | 195199.1 | 4936477F6 | 1178 | 1498 |
| 345 | 195199.1 | 4936477H1 | 1179 | 1394 |
| 345 | 195199.1 | 4936477T6 | 1822 | 2073 |
| 346 | 368731.1 | 5098311T6 | 71 | 515 |
| 346 | 368731.1 | 5098311F6 | 1 | 499 |
| 346 | 368731.1 | 5098311H1 | 1 | 262 |
| 347 | 372313.6 | 5260618F6 | 172 | 611 |
| 347 | 372313.6 | 5260618H1 | 172 | 409 |
| 347 | 372313.6 | 5260618T6 | 387 | 875 |
| 348 | 256871.2 | 5675077H1 | 169 | 286 |
| 348 | 256871.2 | 5675077F6 | 169 | 549 |
| 349 | 256871.16c | 5675077T6 | 219 | 640 |
| 350 | 22485.15 | 342285H1 | 305 | 537 |
| 351 | 22485.1 | 342285R6 | 357 | 859 |
| 351 | 22485.1 | 342285CB1 | 6 | 1038 |
| 352 | 26410.1 | 443631H1 | 44 | 285 |
| 352 | 26410.1 | 443631R6 | 44 | 453 |
| 352 | 26410.1 | 443631T6 | 186 | 521 |
| 353 | 215720.1 | 630607R6 | 1 | 389 |
| 353 | 215720.1 | 630607H1 | 1 | 148 |
| 354 | 472165.22 | 827257R6 | 1 | 338 |
| 354 | 472165.22 | 827257T1 | 2 | 338 |
| 354 | 472165.22 | 827257T6 | 2 | 284 |
| 354 | 472165.22 | 827257R1 | 2 | 338 |
| 354 | 472165.22 | 827257H1 | 1 | 284 |
| 355 | 206580.1 | 919907H1 | 136 | 438 |
| 355 | 206580.1 | 919907R6 | 136 | 615 |
| 355 | 206580.1 | 919907T6 | 204 | 629 |
| 356 | 344775.3 | 1292238F6 | 1929 | 2096 |
| 356 | 344775.3 | 1292238H1 | 1929 | 2095 |
| 356 | 344775.3 | 1292238T6 | 2155 | 2495 |
| 357 | 334668.1 | 1417114F6 | 797 | 956 |
| 357 | 334668.1 | 1417114H1 | 797 | 956 |
| 357 | 334668.1 | 1417114T6 | 797 | 916 |
| 358 | 416874.3 | 1445547H1 | 1416 | 1678 |
| 358 | 416874.3 | 1445547F6 | 1416 | 1949 |
| 358 | 416874.3 | 1445547T6 | 1677 | 2292 |
| 359 | 427964.2 | 1507768T6 | 1138 | 1508 |
| 359 | 427964.2 | 1507768F6 | 1145 | 1548 |
| 359 | 427964.2 | 1507768H1 | 1145 | 1345 |
| 360 | 234537.3c | 1718651H1 | 421 | 608 |
| 360 | 234537.3c | 1718651F6 | 150 | 608 |
| 360 | 234537.3c | 1718651T6 | 31 | 571 |
| 360 | 234537.3c | 2169651T6 | 44 | 556 |
| 360 | 234537.3c | 2169651F6 | 2789 | 3156 |
| 360 | 234537.3c | 2169651H1 | 2915 | 3156 |
| 361 | 31760.1 | 1740072R6 | 1 | 339 |
| 361 | 31760.1 | 1740072H1 | 1 | 242 |
| 361 | 31760.1 | 1740072T6 | 1 | 302 |
| 362 | 336953.7 | 1857708H1 | 5175 | 5437 |
| 362 | 336953.7 | 1857708F6 | 5175 | 5635 |
| 362 | 336953.7 | 1857708T6 | 5518 | 5964 |
| 363 | 444771.2 | 2061119H1 | 321 | 590 |
| 363 | 444771.2 | 2061119R6 | 321 | 619 |
| 363 | 444771.2 | 2061119T6 | 321 | 585 |
| 364 | 449173.16 | 2062092R6 | 2140 | 2505 |
| 364 | 449173.16 | 2062092H1 | 2140 | 2359 |
| 365 | 1523.1 | 2176222F6 | 1 | 481 |
| 365 | 1523.1 | 2176222H1 | 1 | 246 |
| 366 | 239097.1 | 2176222T6 | 15 | 403 |
| 367 | 252747.27 | 2829958H1 | 865 | 1078 |
| 367 | 252747.27 | 2829958F6 | 865 | 1242 |
| 368 | 482490.11 | 2888737F6 | 1 | 255 |
| 368 | 482490.11 | 2888737H1 | 5 | 255 |
| 368 | 482490.11 | 2888737T6 | 39 | 262 |
| 369 | 1000084.27 | 3679667F6 | 1805 | 2138 |
| 369 | 1000084.27 | 3679667H1 | 1986 | 2138 |
| 369 | 1000084.27 | 3679667T6 | 1646 | 2012 |
| 370 | 205607.5 | 009140H1 | 1915 | 2180 |
| 370 | 205607.5 | 009140CB1 | 1 | 3018 |
| 371 | 1089426.1 | 041762H1 | 1 | 82 |
| 372 | 335186.2 | 056197H1 | 351 | 548 |
| 373 | 357276.8 | 391601R6 | 1 | 449 |
| 373 | 357276.8 | 391601T6 | 122 | 594 |
| 374 | 474724.5 | 392166T6 | 3735 | 4307 |
| 374 | 474724.5 | 392166R6 | 3753 | 4182 |
| 375 | 230889.3 | 413767H1 | 790 | 1010 |
| 375 | 230889.3 | 413767R6 | 790 | 1227 |
| 375 | 230889.3 | 413767T6 | 1467 | 2064 |
| 376 | 903909.1 | 660142T6 | 1168 | 1598 |
| 376 | 903909.1 | 660142H1 | 778 | 1006 |
| 376 | 903909.1 | 660142R6 | 784 | 999 |
| 377 | 229298.1 | 1320006T6 | 2658 | 3178 |
| 377 | 229298.1 | 1320006F6 | 2510 | 2966 |
| 378 | 229298.2 | 1320006H1 | 1690 | 1930 |
| 379 | 110678.1 | 1381722H1 | 823 | 920 |
| 379 | 110678.1 | 1381722F6 | 823 | 920 |
| 379 | 110678.1 | 1381722T6 | 825 | 920 |
| 380 | 239093.1 | 1506104T6 | 1 | 466 |
| 380 | 239093.1 | 1506104F6 | 8 | 442 |
| 380 | 239093.1 | 1506104H1 | 8 | 204 |
| 381 | 237963.11c | 1561444F6 | 458 | 805 |
| 381 | 237963.11c | 1561444H1 | 603 | 805 |
| 382 | 237963.8 | 1561444T6 | 1409 | 1797 |
| 383 | 400135.1 | 1562305H1 | 1 | 216 |
| 383 | 400135.1 | 1562305F6 | 1 | 538 |
| 384 | 344398.2 | 1575439T6 | 1733 | 2313 |
| 384 | 344398.2 | 1575439F6 | 2082 | 2454 |
| 384 | 344398.2 | 1575439H1 | 2223 | 2454 |
| 385 | 1086647.1 | 1676601T6 | 632 | 760 |
| 385 | 1086647.1 | 1676601F6 | 633 | 760 |
| 385 | 1086647.1 | 1676601H1 | 633 | 760 |
| 386 | 1682.1 | 1676627T6 | 258 | 635 |
| 386 | 1682.1 | 1676627F6 | 265 | 700 |
| 386 | 1682.1 | 1676627H1 | 265 | 481 |
| 387 | 010190.1c | 1705809F6 | 62 | 330 |
| 387 | 010190.1c | 1705809H1 | 113 | 330 |
| 387 | 010190.1c | 1705809T6 | 62 | 312 |
| 388 | 205311.1 | 1717242F6 | 1 | 355 |
| 388 | 205311.1 | 1717242H1 | 1 | 241 |
| 388 | 205311.1 | 1717242T6 | 40 | 355 |
| 389 | 22429.7 | 1726945F6 | 663 | 1163 |
| 389 | 22429.7 | 1726945H1 | 663 | 886 |
| 389 | 22429.7 | 1726945T6 | 931 | 1340 |
| 390 | 59379.1 | 1728196T6 | 1 | 190 |
| 390 | 59379.1 | 1728196F6 | 8 | 190 |
| 390 | 59379.1 | 1728196H1 | 8 | 198 |
| 391 | 236253.1 | 1812687H1 | 1 | 232 |
| 391 | 236253.1 | 1812687F6 | 1 | 422 |
| 391 | 236253.1 | 1812687T6 | 175 | 575 |
| 392 | 331033.1 | 1970111CB1 | 34 | 2891 |
| 392 | 331033.1 | 1970111F6 | 1092 | 1608 |
| 392 | 331033.1 | 1970111H1 | 1092 | 1378 |
| 392 | 331033.1 | 1970111T6 | 2392 | 2838 |
| 393 | 345533.8c | 2052607F6 | 349 | 451 |
| 393 | 345533.8c | 2052607H1 | 348 | 451 |
| 393 | 345533.8c | 2052607T6 | 390 | 451 |
| 394 | 238342.1 | 2173282T6 | 2531 | 2999 |
| 394 | 238342.1 | 2173282H1 | 2557 | 2790 |
| 394 | 238342.1 | 2173282F6 | 2557 | 2957 |
| 395 | 28936.1 | 2378570F6 | 80 | 580 |
| 395 | 28936.1 | 2378570H1 | 80 | 305 |
| 396 | 347865.5 | 2470377F6 | 1 | 307 |
| 396 | 347865.5 | 2470377H1 | 7 | 105 |
| 397 | 347865.4 | 2470377T6 | 347 | 450 |
| 398 | 40057.2 | 2555937F6 | 487 | 1001 |
| 398 | 40057.2 | 2555937T6 | 502 | 719 |
| 398 | 40057.2 | 2555937H1 | 764 | 1001 |
| 399 | 997301.6 | 2665985H1 | 1 | 217 |
| 399 | 997301.6 | 2665985F6 | 1 | 489 |
| 399 | 997301.6 | 2665985T6 | 275 | 803 |
| 400 | 12235.1 | 2728985F6 | 1 | 428 |
| 400 | 12235.1 | 2728985H1 | 1 | 193 |
| 400 | 12235.1 | 2728985T6 | 1 | 403 |
| 401 | 245496.7 | 2750145H1 | 253 | 517 |
| 401 | 245496.7 | 2750145R6 | 253 | 814 |
| 401 | 245496.7 | 2750145F6 | 365 | 862 |
| 402 | 983262.3c | 2778621F6 | 203 | 574 |
| 402 | 983262.3c | 2778621H1 | 203 | 456 |
| 402 | 983262.3c | 2778621T6 | 335 | 886 |
| 403 | 998084.1 | 2821452H1 | 34 | 347 |
| 403 | 998084.1 | 2821452F6 | 34 | 541 |
| 403 | 998084.1 | 2821452T6 | 171 | 741 |
| 404 | 238071.2 | 2823835T6 | 3140 | 3578 |
| 404 | 238071.2 | 2823835H1 | 2541 | 2820 |
| 404 | 238071.2 | 2823835F6 | 2542 | 3036 |
| 405 | 103930.1 | 2903975H1 | 35 | 272 |
| 405 | 103930.1 | 2903975F6 | 36 | 585 |
| 405 | 103930.1 | 2903975T6 | 434 | 670 |
| 406 | 254068.1 | 2914716F6 | 1 | 438 |
| 406 | 254068.1 | 2914716H1 | 2 | 192 |
| 406 | 254068.1 | 2914716T6 | 25 | 437 |
| 407 | 221812.1 | 2952169F6 | 396 | 768 |
| 407 | 221812.1 | 2952169H1 | 396 | 643 |
| 407 | 221812.1 | 2952169T6 | 388 | 986 |
| 408 | 240129.1 | 2956319F6 | 257 | 421 |
| 408 | 240129.1 | 2956319H1 | 257 | 421 |
| 409 | 230297.1c | 2958047F6 | 1 | 496 |
| 409 | 230297.1c | 2958047T6 | 2 | 453 |
| 409 | 230297.1c | 2958047H1 | 1 | 267 |
| 410 | 347796.7 | 3108506H1 | 395 | 686 |
| 410 | 347796.7 | 3108506F6 | 436 | 687 |
| 411 | 411474.17 | 3143449R6 | 4838 | 5336 |
| 411 | 411474.17 | 3143449H1 | 5028 | 5335 |
| 412 | 027434.1c | 3168342H1 | 1 | 145 |
| 412 | 027434.1c | 3168342F6 | 3 | 145 |
| 413 | 979488.1c | 3168342T6 | 392 | 565 |
| 414 | 213988.1 | 3624062F6 | 9 | 242 |
| 414 | 213988.1 | 3624062H1 | 11 | 218 |
| 414 | 213988.1 | 3624062T6 | 9 | 198 |
| 415 | 263336.62 | 279898T6 | 239 | 581 |
| 415 | 263336.62 | 279898R7 | 261 | 614 |
| 415 | 263336.62 | 279898H1 | 261 | 568 |
| 415 | 263336.62 | 279898R6 | 261 | 608 |
| 416 | 153860.6 | 645136T6 | 222 | 609 |
| 416 | 153860.6 | 645136R6 | 1 | 419 |
| 416 | 153860.6 | 645136H1 | 1 | 247 |
| 417 | 154178.1 | 666098T6 | 1 | 398 |
| 417 | 154178.1 | 666098R6 | 1 | 295 |
| 417 | 154178.1 | 666098H1 | 1 | 201 |
| 418 | 337888.3 | 668460H1 | 1357 | 1560 |
| 418 | 337888.3 | 668460R6 | 1357 | 1538 |
| 418 | 337888.3 | 668460T6 | 1655 | 1872 |
| 419 | 240009.2c | 797955R6 | 1 | 398 |
| 419 | 240009.2c | 797955T6 | 1 | 388 |
| 419 | 240009.2c | 797955H1 | 1 | 123 |
| 420 | 160011.1 | 915572H1 | 1 | 225 |
| 420 | 160011.1 | 915572R6 | 1 | 393 |
| 421 | 332919.4 | 924319R6 | 781 | 1262 |
| 421 | 332919.4 | 924319H1 | 781 | 1142 |
| 422 | 6233.1 | 1357993T6 | 5 | 217 |
| 422 | 6233.1 | 1357993F6 | 8 | 258 |
| 422 | 6233.1 | 1357993H1 | 8 | 214 |
| 423 | 245532.17c | 1738288F6 | 475 | 691 |
| 423 | 245532.17c | 1738288H1 | 471 | 691 |
| 423 | 245532.17c | 1738288T6 | 139 | 579 |
| 424 | 205486.1 | 1743453R6 | 1 | 397 |
| 424 | 205486.1 | 1743453H1 | 1 | 196 |
| 424 | 205486.1 | 1743453T6 | 324 | 608 |
| 425 | 987927.13 | 1798209F6 | 677 | 1233 |
| 425 | 987927.13 | 1798209H1 | 677 | 930 |
| 425 | 987927.13 | 1798209T6 | 2136 | 2698 |
| 426 | 25423.3 | 1816768H1 | 19 | 194 |
| 426 | 25423.3 | 1816768F6 | 19 | 457 |
| 426 | 25423.3 | 1816768T6 | 229 | 726 |
| 427 | 1091415.2 | 2056584R6 | 1217 | 1675 |
| 427 | 1091415.2 | 2056584H1 | 1217 | 1455 |
| 428 | 1091415.16c | 2056584T6 | 178 | 738 |
| 429 | 230058.2 | 2500717H1 | 1707 | 1952 |
| 429 | 230058.2 | 2500717F6 | 1707 | 2165 |
| 429 | 230058.2 | 2500717T6 | 1939 | 2519 |
| 430 | 444648.9 | 2757583H1 | 328 | 585 |
| 430 | 444648.9 | 2757583R6 | 328 | 698 |
| 430 | 444648.9 | 2757583F6 | 328 | 698 |
| 430 | 444648.9 | 2757583CB1 | 268 | 709 |
| 431 | 464689.22 | 2845102F6 | 1659 | 2267 |
| 431 | 464689.22 | 2845102H1 | 1659 | 1900 |
| 432 | 464689.15 | 2845102T6 | 1773 | 2251 |
| 433 | 334809.3c | 2935554H1 | 1058 | 1331 |
| 433 | 334809.3c | 2935554F6 | 831 | 1331 |
| 433 | 334809.3c | 2935554T6 | 38 | 598 |
| 434 | 351241.1 | 2955163H1 | 312 | 587 |
| 434 | 351241.1 | 2955163F6 | 326 | 757 |
| 434 | 351241.1 | 2955163T6 | 346 | 716 |
| 435 | 482336.11 | 5164266H1 | 1 | 205 |
| 435 | 482336.11 | 5164266F6 | 1 | 71 |
| 436 | 482336.31 | 5164266T6 | 1237 | 1458 |
| 437 | 197538.2 | 440472R6 | 585 | 945 |
| 437 | 197538.2 | 440472H1 | 585 | 709 |
| 438 | 197538.8 | 440472T6 | 642 | 1050 |
| 439 | 232048.14 | 548808H1 | 94 | 327 |
| 439 | 232048.14 | 548808R6 | 94 | 632 |
| 439 | 232048.14 | 548808T6 | 216 | 595 |
| 440 | 1092381.1 | 1285892H1 | 5090 | 5310 |
| 441 | 903804.1 | 1287264F6 | 318 | 575 |
| 441 | 903804.1 | 1287264H1 | 336 | 575 |
| 441 | 903804.1 | 1287264F1 | 394 | 575 |
| 442 | 210945.6 | 1288118H1 | 299 | 550 |
| 442 | 210945.6 | 1288118F6 | 299 | 688 |
| 443 | 210945.3c | 1288118CB1 | 1 | 1120 |
| 443 | 210945.3c | 1288118T6 | 539 | 856 |
| 444 | 403448.2 | 1292773T6 | 2224 | 2602 |
| 444 | 403448.2 | 1292773F6 | 2256 | 2647 |
| 444 | 403448.2 | 1292773H1 | 2269 | 2509 |
| 445 | 238263.2 | 1301770F6 | 669 | 1096 |
| 445 | 238263.2 | 1301770H1 | 669 | 913 |
| 445 | 238263.2 | 1301770T6 | 1245 | 1774 |
| 446 | 146382.22 | 1313615F6 | 1107 | 1702 |
| 446 | 146382.22 | 1313615H1 | 1107 | 1339 |
| 447 | 146382.25 | 1313615T6 | 165 | 467 |
| 448 | 345705.7 | 1357056H1 | 58 | 304 |
| 448 | 345705.7 | 1357056F1 | 58 | 490 |
| 448 | 345705.7 | 1357056T6 | 2026 | 2525 |
| 448 | 345705.7 | 1357056F6 | 58 | 509 |
| 448 | 345705.7 | 1357056CA2 | 58 | 2578 |
| 449 | 198212.1 | 1377880F6 | 262 | 706 |
| 449 | 198212.1 | 1377880H1 | 262 | 514 |
| 450 | 198212.6 | 1377880T6 | 1232 | 1600 |
| 451 | 900031.8 | 1402833F6 | 1 | 574 |
| 451 | 900031.8 | 1402833H1 | 1 | 233 |
| 452 | 900031.4 | 1402833T6 | 5643 | 6007 |
| 453 | 475365.4 | 1430483F6 | 443 | 829 |
| 453 | 475365.4 | 1430483H1 | 443 | 695 |
| 453 | 475365.4 | 1430483T6 | 1273 | 1699 |
| 454 | 222810.1 | 1438102T6 | 886 | 1263 |
| 454 | 222810.1 | 1438102F6 | 1 | 459 |
| 454 | 222810.1 | 1438102H1 | 1 | 263 |
| 455 | 1084493.6 | 1503350H1 | 1299 | 1571 |
| 455 | 1084493.6 | 1503350F6 | 1308 | 1629 |
| 455 | 1084493.6 | 1503350T6 | 2679 | 3224 |
| 456 | 979005.2 | 1512017H1 | 2127 | 2297 |
| 456 | 979005.2 | 1512017T6 | 3743 | 4252 |
| 456 | 979005.2 | 1512017F6 | 2127 | 2625 |
| 457 | 346686.23 | 1596060T6 | 2552 | 3060 |
| 457 | 346686.23 | 1596060H1 | 2040 | 2231 |
| 457 | 346686.23 | 1596060F6 | 2040 | 2477 |
| 458 | 234568.25 | 1624988H1 | 33 | 108 |
| 458 | 234568.25 | 1624988F6 | 33 | 458 |
| 459 | 234568.17 | 1624988T6 | 2421 | 3023 |
| 460 | 978276.1c | 1639657H1 | 387 | 546 |
| 460 | 978276.1c | 1639657F6 | 278 | 546 |
| 461 | 26968.1 | 1663359F6 | 1 | 468 |
| 461 | 26968.1 | 1663359H1 | 1 | 225 |
| 462 | 243103.24 | 1664686T6 | 907 | 1496 |
| 462 | 243103.24 | 1664686F6 | 112 | 673 |
| 462 | 243103.24 | 1664686H1 | 112 | 342 |
| 463 | 469883.1 | 1670240H1 | 3910 | 4101 |
| 463 | 469883.1 | 1670240F6 | 3910 | 4382 |
| 463 | 469883.1 | 1670240T6 | 3961 | 4578 |
| 464 | 903565.14c | 1672574T6 | 43 | 352 |
| 464 | 903565.14c | 1672574F6 | 2490 | 3031 |
| 464 | 903565.14c | 1672574H1 | 2830 | 3031 |
| 465 | 227932.2 | 1674711H1 | 4373 | 4511 |
| 466 | 903691.6 | 1706278H1 | 2489 | 2717 |
| 466 | 903691.6 | 1706278F6 | 2489 | 2870 |
| 467 | 012995.19c | 1706278T6 | 57 | 561 |
| 468 | 407938.5 | 1727746T6 | 7648 | 8083 |
| 468 | 407938.5 | 1727746H1 | 5870 | 6083 |
| 468 | 407938.5 | 1727746F6 | 5870 | 6174 |
| 469 | 233778.1 | 1748894F6 | 271 | 723 |
| 469 | 233778.1 | 1748894H1 | 271 | 527 |
| 469 | 233778.1 | 1748894T6 | 544 | 792 |
| 470 | 474630.19 | 1807178F6 | 2975 | 3418 |
| 470 | 474630.19 | 1807178H1 | 2975 | 3240 |
| 471 | 217319.7 | 1808080H1 | 1303 | 1574 |
| 471 | 217319.7 | 1808080F6 | 1303 | 1603 |
| 471 | 217319.7 | 1808080T6 | 1719 | 2059 |
| 472 | 1092445.1 | 1808250F6 | 2139 | 2619 |
| 472 | 1092445.1 | 1808250H1 | 2363 | 2628 |
| 473 | 199433.3 | 1852003F6 | 51 | 377 |
| 473 | 199433.3 | 1852003H1 | 51 | 320 |
| 473 | 199433.3 | 1852003T6 | 625 | 761 |
| 474 | 228860.6 | 1857460F6 | 92 | 510 |
| 474 | 228860.6 | 1857460H1 | 92 | 342 |
| 475 | 228860.4c | 1857460T6 | 456 | 1028 |
| 476 | 410688.3 | 1891428F6 | 1 | 219 |
| 476 | 410688.3 | 1891428H1 | 1 | 279 |
| 477 | 347005.5 | 1929865F6 | 6818 | 7115 |
| 477 | 347005.5 | 1929865H1 | 6819 | 7081 |
| 477 | 347005.5 | 1929865T6 | 6818 | 7074 |
| 478 | 334621.13 | 1965915R6 | 329 | 735 |
| 478 | 334621.13 | 1965915H1 | 329 | 611 |
| 478 | 334621.13 | 1965915T6 | 413 | 975 |
| 479 | 28180.1 | 1970545F6 | 411 | 817 |
| 479 | 28180.1 | 1970545H1 | 411 | 653 |
| 479 | 28180.1 | 1970545T6 | 425 | 814 |
| 480 | 252570.6c | 1972687T6 | 501 | 1044 |
| 480 | 252570.6c | 1972687F6 | 3 | 437 |
| 480 | 252570.6c | 1972687H1 | 3 | 264 |
| 481 | 466402.116 | 2025345R6 | 1118 | 1458 |
| 481 | 466402.116 | 2025345T6 | 1118 | 1419 |
| 481 | 466402.116 | 2025345H1 | 1118 | 1378 |
| 482 | 1096160.26c | 2152021F6 | 961 | 1348 |
| 482 | 1096160.26c | 2152021H1 | 961 | 1209 |
| 482 | 1096160.26c | 2152021T6 | 3034 | 3327 |
| 482 | 1096160.26c | 2152021CB1 | 1 | 3006 |
| 483 | 899612.2 | 2188034F6 | 404 | 865 |
| 483 | 899612.2 | 2188034H1 | 404 | 715 |
| 484 | 254107.1 | 2198878F6 | 1811 | 2268 |
| 484 | 254107.1 | 2198878H1 | 1811 | 2055 |
| 484 | 254107.1 | 2198878T6 | 2597 | 3123 |
| 485 | 208328.1 | 2200534F6 | 2103 | 2527 |
| 485 | 208328.1 | 2200534H1 | 2103 | 2317 |
| 486 | 130157.2 | 2295946T6 | 2207 | 2554 |
| 486 | 130157.2 | 2295946R6 | 1310 | 1772 |
| 486 | 130157.2 | 2295946H1 | 1310 | 1459 |
| 487 | 985824.2c | 2330285T6 | 1252 | 1591 |
| 487 | 985824.2c | 2330285H1 | 1252 | 1507 |
| 487 | 985824.2c | 2330285R6 | 1252 | 1634 |
| 488 | 233089.1 | 2350723T6 | 1921 | 2022 |
| 488 | 233089.1 | 2350723F6 | 1928 | 2064 |
| 489 | 336256.1 | 2443920H1 | 1681 | 1863 |
| 489 | 336256.1 | 2443920F6 | 1681 | 2077 |
| 489 | 336256.1 | 2443920T6 | 2982 | 3515 |
| 490 | 979616.2 | 2454756F6 | 458 | 830 |
| 490 | 979616.2 | 2454756H1 | 458 | 692 |
| 490 | 979616.2 | 2454756T6 | 881 | 1322 |
| 491 | 351432.3 | 2457793H1 | 1332 | 1537 |
| 491 | 351432.3 | 2457793F6 | 1332 | 1814 |
| 491 | 351432.3 | 2457793T6 | 4870 | 5364 |
| 492 | 83495.1 | 2499861F6 | 1 | 378 |
| 492 | 83495.1 | 2499861H1 | 1 | 255 |
| 493 | 332595.1 | 2500879F7 | 1 | 368 |
| 493 | 332595.1 | 2500879H1 | 1 | 247 |
| 493 | 332595.1 | 2500879F6 | 1 | 543 |
| 494 | 481251.3 | 2506154T6 | 967 | 1069 |
| 494 | 481251.3 | 2506154F6 | 1 | 313 |
| 494 | 481251.3 | 2506154H1 | 47 | 249 |
| 495 | 25612.1 | 2582525F6 | 221 | 371 |
| 495 | 25612.1 | 2582525H1 | 221 | 516 |
| 496 | 96700.1 | 2788603F6 | 1 | 519 |
| 496 | 96700.1 | 2788603H1 | 1 | 231 |
| 497 | 230048.1 | 2788603T6 | 142 | 663 |
| 498 | 073621.3c | 2878629F6 | 1690 | 1992 |
| 499 | 344582.19 | 2878629H1 | 1 | 216 |
| 500 | 997526.4 | 2891590F6 | 1 | 416 |
| 500 | 997526.4 | 2891590H1 | 1 | 262 |
| 501 | 997526.1 | 2891590T6 | 2443 | 2854 |

What is claimed is:

1. A combination comprising a plurality of cDNAs, wherein the cDNAs are selected from SEQ ID NOs:1-501 and the complements of SEQ ID NOs:1-501.

2. The combination of claim 1, wherein each of the cDNAs is downregulated at least two-fold and is selected from SEQ ID NOs:1-56, 87-153, 164-349, 370-414, and 437-501 and the complements of SEQ ID NOs:1-56, 87-153, 164-349, 370-414, and 437-501.

3. The combination of claim 1, wherein each of the cDNAs is upregulated at least two-fold and is selected from SEQ ID NOs:57-86, 154-163, 350-369, and 415-436 and the complements of 57-86, 154-163, 350-369, and 415-436.

4. The combination of claim 1, wherein the cDNAs are immobilized on a substrate.

5. An isolated cDNA selected from SEQ ID NOs: 14, 26, 40, 52, 55, 60, 65, 68, 73, 79, 82, 85, 92, 110, 112, 114, 115, 117, 122, 125, 126, 130, 136, 137, 139, 141, 143, 144, 145, 146, 147, 160, 164, 166, 167, 168, 190, 191, 194, 195, 199, 201, 204, 211, 212, 222, 224, 226, 229, 233, 234, 240, 243, 245, 248, 250, 253, 254, 259, 264, 268, 269, 270, 272, 276, 278, 279, 281, 282, 284, 285, 286, 293, 296, 297, 299, 300, 301, 362, 306, 308, 312, 313, 314, 317, 319, 321, 321, 322, 322, 323, 324, 325, 326, 330, 331, 332, 334, 336, 337, 338, 339, 340, 342, 346, 353, 355, 357, 361, 365, 366, 371, 372, 376, 380, 383, 385, 386, 387, 390, 399, 400, 402, 405, 406, 408, 409, 410, 412, 413, 417, 418, 419, 420, 422, 422, 424, 426, 438, 444, 445, 453, 456, 460, 461, 471, 479, 480, 487, 490, 492, 495, 496, and 497 and the complements thereof.

6. A method for detecting differential expression of one or more cDNAs in a sample containing nucleic acids, the method comprising:
a) hybridizing the substrate of claim 4 with the nucleic acids, thereby forming one or more hybridization complexes;
b) detecting hybridization complex formation; and
c) comparing the complexes so formed with those of a standard, wherein differences between the standard and sample complex formation indicate differential expression of cDNAs in the sample.

7. The method of claim 6, wherein the sample is from prostate.

8. The method of claim 6, wherein differential expression is diagnostic of prostate cancer.

9. A method for screening a plurality of molecules or compounds to identify a ligand which specifically binds the cDNA, the method comprising:
a) combining the combination of claim 1 with the plurality of molecules or compounds under conditions to allow specific binding; and
b) detecting specific binding between each cDNA and at least one molecule or compound, thereby identifying a ligand that specifically binds each cDNA.

10. The method of claim 9 wherein the plurality of molecules or compounds are selected from DNA molecules, enhancers, mimetics, RNA molecules, peptide nucleic acids, peptides, repressors and transcription factors.

11. A vector containing the cDNA of claim 5.

12. A host cell containing the vector of claim 11.

13. A method for producing a protein, the method comprising:
a) culturing the host cell of claim 12 under conditions for expression of protein; and
b) recovering the protein from the host cell culture.

14. A protein produced by the method of claim 13.

15. A method for using a protein to screen a plurality of molecules or compounds to identify at least one ligand which specifically binds the protein, the method comprising:
a) combining the protein of claim 14 with the plurality of molecules or compounds under conditions to allow specific binding; and
b) detecting specific binding between the protein and a molecule or compound, thereby identifying a ligand which specifically binds the protein.

16. The method of claim 15 wherein the plurality of molecules or compounds is selected from agonists, antagonists, antibodies, DNA molecules, mimetics, peptide nucleic acids, peptides, proteins, or pharmaceutical agents, RNA molecules, and small drug molecules.

17. A composition comprising the protein of claim 14 and a pharmaceutical carrier.

18. A method of using a protein to produce and purify an antibody, the method comprising:
a) immunizing an animal with the protein of claim 14 under conditions to elicit an antibody response;
b) obtaining a sample containing antibodies;
c) combining the sample with the protein under conditions to allow specific binding;
d) recovering the bound protein; and
e) separating the protein from the antibody, thereby obtaining purified antibody that specifically binds the protein.

19. A purified antibody produced by the method of claim 18.

20. A method of using an antibody to detect prostate cancer, the method comprising:
a) contacting a sample with the antibody of claim 19 under conditions to form an antibody:protein complex;
b) detecting antibody:protein complex formation; and
c) comparing complex formation with standards, wherein complex formation indicates the presence of prostate cancer in the sample.

The application's sequence listing, which the Patent Office published only in electronic form, follows.

SEQUENCE LISTING (501 sequences)

SEQ ID NO: 1 - DNA, 2342 bp, Homo sapiens
  misc_feature: Incyte ID No: 441269.2
cagcggcgggcgggggctgtggctccgggccgccgccgctgctgctgagcgagggcgagcagcagtgctactccgagctcttcgcgcgctgtgccggcgccgcgggcgggggccccgggtctgggccccccgaggccgccagagtcgcccccggcacggccactgcggccgccggccccgtggctgacctgtttcgggcatcgcagctgcccgccgagacgctgcaccagatcacagaactgtgtggtgcaaagcgggttggttattttggtccaacacagttttacattgccctgaaattaattgctgcagcacaatctggcctcccggtacggatagagagtattaaatgtgaattgcctctgcctcgctttatgatgtcaaagaatgatggtgagatacgatttgggaacccagctgagctgcatggaactaaggttcagattccatatttaactacagaaaaaaattccttcaaaagaatggacgatgaggataaacagcaggaaacacagtctcccacgatgtcacccctcgcctcccctccttcttccccgcctcattaccagagggtgcccttgagccatggctacagcaaactgcggagcagcgcagaacagatgcatccagcaccttatgaagctaggcagccccttgtccagcccgagggatcctcatcagggggcccaggaaccaagccccttcggcatcaggcttcccttatccggtccttttcagtggagagggaactacaggataacagcagttaccccgacgaaccctggaggataacagaagaacagcgcgagtactatgtcaatcagttccgatcccttcagccagacccaagctctttcatttcaggttctgtggccaagaacttcttcaccaaatcaaagctttccattccagaactctcctatatatgggagcttagtgatgctgactgtgatggagccctgaccctgcctgagttctgtgctgcgtttcatctcattgtggctcggaagaacggctacccattgcctgagggcctccctccaactctgcagccagaatacctgcaggcagcttttcctaagcccaaatgggactgtcaattatttgattcttattctgagtcactgccggcaaatcaacaacctcgtgacttgaatcggatggagaagacatctgttaaagacatggctgaccttcctgtccctaaccaggatgtaactagtgatgacaaacaagctttgaaaagtactatcaatgaagccttaccaaaggacgtgtctgaggatccagcaactcccaaggattccaacagtctcaaagcaagaccaagatccagatcttactctagcacctccatagaagaggccatgaaaaggggcgaggaccctcccaccccgccacctcggccacagaaaacccattccagagcctcctccttggatctgaataaagtcttccagcccagtgtgccagctaccaagtcaggattgttacccccaccacctgcgctccctccaagaccttgtccatcacagtctgaacaagtgtcggaggccgagttactcccacagctgagcagagccccatcccaggctgcagaaagtagtccagcaaagaaggatgtactgtattctcagccaccatcaaagcccattcgtaggaaattcagaccagaaaaccaagctacagaaaaccaagagccttccactgctgcaagtgggccagcttctgcggcaaccatgaaaccgcatccaacagtccaaaagcagtcttccaaacagaagaaggccattcaaactgctatccgcaaaaataaagaggcaaacgcagtgctggctcggctgaacagtgagctccagcagcagctcaaggaggttcatcaagaacgaattgcattggaaaaccaattggaacaacttcgtccggtcactgtgttgtgacccccccatggttcaagtgacagtgggtgaccttgtctgccaagatctttcttttgaatgttttgaacccaactacttgtcatagatgtttgactgtgtcaaaagctgtgagcagcaaaatataatccatatgaccttttctcttgcacttcacttgtatgttttactgtggtggaaaaaatacttcaactgattatcacacttgaaatgctaattatcagtggaatttgtctcctattcttaagtacttctgccaggtattagatgctgctccttaccaaaaatcagtcttctagcaaattaaaataacttagagcattatttatttaaagaatttatgttttctataaaaccttattaccaagaaccttcaggatgcttgtaacccagtactttcaggat

SEQ ID NO: 2 - DNA, 4186 bp, Homo sapiens
  misc_feature: Incyte ID No: 003161.5
  unsure 1746-1802: a, t, c, g, or other
gcaacctgggacttgataaaccggaagattaagtctgtagcactgtgtgtagcagcgtgtccaaggcaagaactgaaaactctgagtgatgttcagaagtttgcagagataaatggttcagccctatgtagctacaacctaaagccttctgaatacactacatctccaaaatcttctgttctctgccccaaactaccagttccagcgagtgcacctattccattcttccatcgctgtgctcctgtgaacatttcctgctatgccaagtttgcagaggccctgatcacctttgtcagtgacaatagtgtcttacacaggctgattagtggagtaatgaccagcaaagaaattatattgggactttgcttgttatcactagttctatccatgattttgatggtgataatcaggtatatatcaagagtacttgtgtggatcttaacgattctggtcatactcggttcacttggaggcacaggtgtactatggtggctgtatgcaaagcaaagaaggtctcccaaagaaactgttactcctgagcagcttcagatagctgaagacaatcttcgggccctcctcatttatgccatttcagctacagtgttcacagtgatcttattcctgataatgttggttatgcgcaaacgtgttgctcttaccatcgccttgttccacgtagctggcaaggtcttcattcacttgccactgctagtcttccaacccttctggactttctttgctcttgtcttgttttgggtgtactggatcatgacacttctttttcttggcactaccggcagtcctgttcagaatgagcaaggctttgtggagttcaaaatttctgggcctctgcagtacatgtggtggtaccatgtggtgggcctgatttggatcagtgaatttattctagcatgtcagcagatgacagtggcaggagctgtggtaacatactattttactagggataaaaggaatttgccatttacacctattttggcatcagtaaatcgccttattcgttaccacctaggtacggtggcaaaaggatctttcattatcacattagtcaaaattccgcgaatgatccttatgtatattcacagtcagctcaaaggaaaggaaaatgcttgtgcacgatgtgtgctgaaatcttgcatttgttgcctttggtgtcttgaaaagtgcctaaattatttaaatcagaatgcatacacagccacagctatcaacagcaccaacttctgcacctcagcaaaggatgcctttgtcattctggtggagaatgctttgcgagtggctaccatcaacacagtaggagattttatgttattccttggcaaggtgctgatagtctgcagcacaggtttagctgggattatgctgctcaactaccagcaggactacacagtatgggtgctgcctctgatcatcgtctgcctctttgctttcctagtcgctcattgcttcctgtctatttatgaaatggtagtggatgtattattcttgtgttttgccattgatacaaaatacaatgatgggagccctggcagagaattctatatggataaagtgctgatggagtttgtggaaaacagtaggaaagcaatgaaagaagctggtaagggaggcgtcgctgattccagagagctaaagccgatggcttcgggagcaagttctgcttgaacctagccgacggttatggaaacccattgacattccaaaacaatatatacacataactatgtnnnnnnnnnnnnnnnnnnnnnnnnnnnnnnnnnnnnnnnnnnnnnnnnnnnnnnnnntgtatatacacacacacacataaatcagccaaaatcagagaaaaggaacagggatttaataccttttttatgcttatttttgtcaaacatgtactcctttcatacgggtggcttttacaaggcaacttccgtcatttaatgttttcaactgtaattgtcttaatggaaatgttaaaattcatatctgattaacatttttaataacttagaggagattttaactttatttaaaaataggtaaaattattgtacctaattatgtctaaagtttattcaggggtaatttccctgatgtctgtataaaatcaagatcttattttactgatgcataagtcctagtgggtcaagactaggcatatgctttcagataaataaggaattactccaatcagttttccccaatcaaagaagccatgtcattttacttttagaaacatacaattgggcccaatatgggaattttcataatagttcatacatttgtcagccaacattaaaaggtaaccaactcctcaggtatttgtagtttaccctaacgcttctttaaaagaaagtaggtaaaaaaagaaaagggtagataatctttcgtatgcaaacttttcccttatattttgtctttctttcctttttgactttagtagcatcctccacacatttgtgtgcctgatttgaaaggaagctggggcacccagcgagtttagcctttaagtttctgtgtattgatttgcagattaagtaatgctgagaggaataaagaagggacagaaacatggaacataaagcattgaaaattccggtgcttgggcttcggcttcagagtaacgtcagtggcttagggttaaacggccattttattcaaatgcttgctatacaatctgaaaacacactggcaggtgctcctctccttggcaattcattgagtatccagagttctacgatgtttaactgaagaattggctaatgttttgatcctccagtgtgactgttgtttttgtttgggggtgggtttggggttttttgcttttttattcctgaagcttaccagatatgaatggctaatactccattgttctgcttgttgtaatggtgaatgctttaagaaaaaaaagtgtaatttgctaagaataattcatgatctgtttatgcgataactcctttttgttacaatttttttaaaaaaagctatttttgttaatgtaaagtaaatatttcagagcaaattttttaaacttattgcactaaatacaggctctgtacaaaaaaaaaagcctcagcattttatcattccatggaaggagaatcttttgaaagaaagcattgcctcctaccagaactagacagtgaattagatcggtattatggaaatgcatacaagtaatgtcactagggcttaataagcagccgtttgctaatgtgcttcctttcaaagggttggacctttaaattgctgcaaaaggtaaattgtatttttttttaagtattggtgttctttactctagctaggctaaaatttgctaaatgccttggtttcttttaaaagttcatgtaatatttctgatttttcagaatatttgcaataagagtctggattttaaaaaacacatgcatacacacaattaagagctcatgtcttagcaagatctgggaaaccaacattgcgagagtagctattttgaaagaataattctccagaagttaacatctaatatctagtatcaccaaacagtatcgctgttctcttttattcatttgaaatgaatataattatataactaacaattgtccaaatagatgagagagcaaatcatgtgagaaaattcagaataccatctgtttcatagccgcacagattttggactttcacaaacattgggaactaaatttagaattggcaaaagtctagaagatgggtatcaaaacagaagacattccaggagctagcaattttaagaggtgtccctccaaagtgacctgatggaagtcctgaacttggaaattaggttctactcacttggacatccctgcatcatggactgttgctgctccctgttccatatgctcgcaatctcagctatttggaagctaccaggaatgctttctaattatcatttgcaactagaactgtaatcagaaagaaattttgtatttttgtataacttgattgtgtgccattttatataacaggtcctgttttacaaataaattttgttttactaacattgtgtttagaaattataatctatgtgtaaccatgtcatttgagttgcaaattaattgccaggctgttttccttaagtaaattcatgtgccgtgtagaaatatgcagatatgcattacacaggcacacacagagagatatttaatatgtggaatatcactctttc

SEQ ID NO: 3 - DNA, 3816 bp, Homo sapiens
  misc_feature: Incyte ID No: 977955.7
  unsure 3725, 3784, 3800, 3805: a, t, c, g, or other
tcccgatcctcatccccttgccctcccccagcccagggacttttccggaaagtttttattttccgtctgggctctcggagaaagaagctcctggctcagcggctgcaaaactttcctgctgccgcgccgccagcccccgccctccgctgcccggccctgcgccccgccgagcgatgagcgcccctccggtcctgcggccgcccagtccgctgctgcccgtggcggcggcagctgccgcagcggccgccgcactggtcccagggtccgggcccgggcccgcgccgttcttggctcctgtcgcggccccggtcgggggcatctcgttccatctgcagatcggcctgagccgtgagccggtgctgctgctgcaggactcgtccggggactacagcctggcgcacgtccgcgagatggcttgctccattgtcgaccagaagttccctgaatgtggtttctacggaatgtatgataagatcctgctttttcgccatgaccctacctctgaaaacatccttcagctggtgaaagcggccagtgatatccaggaaggcgatcttattgaagtggtcttgtcagcttccgccacctttgaagactttcagattcgtccccacgctctctttgttcattcatacagagctccagctttctgtgatcactgtggagaaatgctgtgggggctggtacgtcaaggtcttaaatgtgaagggtgtggtctgaattaccataagagatgtgcatttaaaatacccaacaattgcagcggtgtgaggcggagaaggctctcaaacgtttccctcactggggtcagcaccatccgcacatcatctgctgaactctctacaagtgcccctgatgagccccttctgcaaaaatcaccatcagagtcgtttattggtcgagagaagaggtcaaattctcaatcatacattggacgaccaattcaccttgacaagattttgatgtctaaagttaaagtgccgcacacatttgtcatccactcctacacccggcccacagtgtgccagtactgcaagaagcttctgaaggggcttttcaggcagggcttgcagtgcaaagattgcagattcaactgccataaacgttgtgcaccgaaagtaccaaacaactgccttggcgaagtgaccattaatggagatttgcttagccctggggcagagtctgatgtggtcatggaagaagggagtgatgacaatgatagtgaaaggaacagtgggctcatggatgatatggaagaagcaatggtccaagatgcagagatggcaatggcagagtgccagaacgacagtggcgagatgcaagatccagacccagaccacgaggacgccaacagaaccatcagtccatcaacaagcaacaatatcccactcatgagggtagtgcagtctgtcaaacacacgaagaggaaaagcagcacagtcatgaaagaaggatggatggtccactacaccagcaaggacacgctgcggaaacggcactattggagattggatagcaaatgtattaccctctttcagaatgacacaggaagcaggtactacaaggaaattcctttatctgaaattttgtctctggaaccagtaaaaacttcagctttaattcctaatggggccaatcctcattgtttcgaaatcactacggcaaatgtagtgtattatgtgggagaaaatgtggtcaatccttccagcccatcaccaaataacagtgttctcaccagtggcgttggtgcagatgtggccaggatgtgggagatagccatccagcatgcccttatgcccgtcattcccaagggctcctccgtgggtacaggaaccaacttgcacagagatatctctgtgagtatttcagtatcaaattgccagattcaagaaaatgtggacatcagcacagtatatcagatttttcctgatgaagtactgggttctggacagtttggaattgtttatggaggaaaacatcgtaaaacaggaagagatgtagctattaaaatcattgacaaattacgatttccaacaaaacaagaaagccagcttcgtaatgaggttgcaattctacagaaccttcatcaccctggtgttgtaaatttggagtgtatgtttgagacgcctgaaagagtgtttgttgttatggaaaaactccatggagacatgctggaaatgatcttgtcaagtgaaaagggcaggttgccagagcacataacgaagtttttaattactcagatactcgtggctttgcggcaccttcattttaaaaatatcgttcactgtgacctcaaaccagaaaatgtgttgctagcctcagctgatccttttcctcaggtgaaactttgtgattttggttttgcccggatcatcggagagaagtctttccggaggtcagtggtgggtacccccgcttacctggctcctgaggtcctaaggaacaagggctacaatcgctctctagacatgtggtctgttggggtcatcatctatgtaagcctaagcggcacattcccatttaatgaagatgaagacatacacgaccaaattcagaatgcagctttcatgtatccaccaaatccctggaaggaaatatctcatgaagccattgatcttatcaacaatttgctgcaagtaaaaatgagaaagcgctacagtgtggataagaccttgagccacccttggctacaggactatcagacctggttagatttgcgagagctggaatgcaaaatcggggagcgctacatcacccatgaaagtgatgacctgaggtgggagaagtatgcaggcgagcaggggctgcagtaccccacacacctgatcaatccaagtgctagccacagtgacactcctgagactgaagaaacagaaatgaaagccctcggtgagcgtgtcagcatcctctgagttccatctcctataatctgtcaaaacactgtggaactaataaatacatacggtcaggtttaacatttgccttgcagaactgccattattttctgtcagatgagaacaaagctgttaaactgttagcactgttgatgtatctgagttgccaagacaaatcaacagaagcatttgtattttgtgtgaccaactgtgttgtattaacaaaagttccctgaaacacgaaacttgttattgtgaatgattcatgttatatttaatgcattaaacctgtctccactgtgcctttgcaaatcagtgtttttcttactggagcttcattttggtaagagacagaatgtatctgtgaagtagttctgtttggtgtgtcccattggtgttgtcattgtaaacaaactcttgaagagtcgattatttccagtgttctatgaacaactccaaaacccatgtgggaaaaaaatgaataaggagggtagggaataaaatcctaagacacaaatgcatgaacaagttttaatgtatagttttgaatcctttgcctgcctggtgtgcctcagtatatttaaactcaagacaatgcacctagctgtgcaagacctagtgctcttaagcctaaatgccttagaaatgtaaactgccatatataacagatacatttccctctttcttataatactctgttgtactatggaaaatcagctgctcagcaacctttcacctttgtgtatttttcaataataaaaaatattcttgtcaaaatatgtgtccacctcattgaactattttcattcatcgttcacactagggttttcnggccaactaggagcagaagtgtctgctcagaaagcaggaaaaaagctcatagtgtagantgtagttttatcgacncggangcagtaaaagt

SEQ ID NO: 4 - DNA, 2701 bp, Homo sapiens
  misc_feature: Incyte ID No: 350754.2
gcactgtccgtgccattcccagaggagcctgagaagaggcagaggaaggcgaaacatggctgctctaggagtccagagtatcaactggcagaaggccttcaaccgacaagcgcatcacacagacaagttctccagccaggagctcatcttgcggagaggccaaaacttccaggtcttaatgatcatgaacaaaggccttggctctaacgaaagactggagttcattgtctccacagggccttacccctcagagtcggccatgacgaaggctgtgtttccactctccaatggcagtagtggtggctggagtgcggtgcttcaggccagcaatggcaatactctgactatcagcatctccagtcctgccagcgcacccataggacggtacacaatggccctccagatcttctcccagggcggcatctcctctgtgaaacttgggacgttcatactgctttttaacccctggctgaatgtggatagcgtctttatgggtaaccacgctgagagagaagagtatgttcaggaagatgccggcatcatctttgtgggaagcacaaaccgaattggcatgattggctggaactttggacagtttgaagaagacattctcagcatctgcctctcaatcttggataggagtctgaatttccgccgtgacgctgctactgatgtggccagcagaaatgaccccaaatacgttggccgggtgctgagtgccatgatcaatagcaatgatgacaatggtgtgcttgctgggaattggagcggcacttacaccggtggccgggacccaaggagctggaacggcagcgtggagatcctcaaaaattggaaaaaatctggcttcagcccagtccgatatggccagtgctgggtctttgctgggaccctcaacacagcgctgcggtctttggggattccttcccgggtgatcaccaacttcaactcagctcatgacacagaccgaaatctcagtgtggatgtgtactacgaccccatgggaaaccccctggacaagggtagtgatagcgtatggaatttccatgtctggaatgaaggctggtttgtgaggtctgacctgggcccctcgtacggtggatggcaggtgttggatgctaccccgcaggaaagaagccaaggggtgttccagtgcggccccgcttcggtcattggtgttcgagagggtgatgtgcagctgaacttcgacatgccctttatcttcgcggaggttaatgccgaccgcatcacctggctgtacgacaacaccactggcaaacagtggaagaattccgtgaacagtcacaccattggcaggtacatcagcaccaaggcggtgggcagcaatgctcgcatggacgtcacggacaagtacaagtacccagaaggctctgaccaggaaagacaagtgttccaaaaggctttggggaaacttaaacccaacacgccatttgccgcgacgtcttcaatgggtttggaaacagaggaacaggagcccagcatcatcgggaagctgaaggtcgctggcatgctggcagtaggcaaagaagtcaacctggtcctactgctcaaaaacctgagcagggatacgaagacagtgacagtgaacatgacagcctggaccatcatctacaacggcacgcttgtacatgaagtgtggaaggactctgccacaatgtccctggaccctgaggaagaggcagaacatcccataaagatctcgtacgctcagtatgagaagtacctgaagtcagacaacatgatccggatcacagcggtgtgcaaggtcccagatgagtctgaggtggtggtggagcgggacatcatcctggacaaccccaccttgaccctggaggtgctgaacgaggctcgtgtgcggaagcctgtgaacgtgcagatgctcttctccaatccactggatgaagccggtgaagggactgcgtgctgattggtggaagggaagcggcctgctgttgggtaacctgaagatcgacgtgccgaccctagggcccaaggagcggtcccgggtccgttttgatatcctgccctcccggagtggcaccaagcaactgctcgccgacttctcctgcaacaagttccctgcaatcaaggccatgttgtccatcgatgtagccgaatgaagggcgctggtggcctcccgtacaaacttggacaacacggagcagggagagctcaccatggaatgaaccccccgcccatgctgtccggcctgggaaaccctctccatctcccaaggctgccagacatggacctccaggctccagcacatccccctctcctctcccccaggttggggctgggtccaccctgtcctatgacttgatcacttttgcacattccctggccgcttctccccagagctgcctgctctgtgagccccacagccctgctcattcctcacgcccttcaatgctgcaggatggactggcccctgacccagggactctccaaacgggatacaggagagaagctggtctagactgtttgctgatccccaacctgcacggggcattcctgcttctctctcaggccaccacagagggcaggggatggttagtcacctgccccagcactcacaccctaactcaaaataaatgttaaataagtgcgatcacacagcaccgactctacctgactgctgttgcacctaaggtggtgaaggagagaggaggctgtggcc

SEQ ID NO: 5 - DNA, 839 bp, Homo sapiens
  misc_feature: Incyte ID No: 235191.4
gcccccagagggttacaattcaaacgcgggcgggcgggcccgcagtcctgcagttgcagtcgtgttctccgagttcctgtctctctgccaacgccgcccggatggcttcccaaaaccgcgacccagccgccactagcgtcgccgccgcccgtaaaggagctgagccgagcgggggcgccgcccggggtccggtgggcaaaaggctacagcaggagctgatgaccctcatgatgtctggcgataaagggatttctgccttccctgaatcagacaaccttttcaaatgggtagggaccatccatggagcagctggaacagtatatgaagacctgaggtataagctctcgctagagttccccagtggctacccttacaatgcgcccacagtgaagttcctcacgccctgctatcaccccaacgtggacacccagggtaacatatgcctggacatcctgaaggaaaagtggtctgccctgtatgatgtcaggaccattctgctctccatccagagccttctaggagaacccaacattgatagtcccttgaacacacatgctgccgagctctggaaaaaccccacagcttttaagaagtacctgcaagaaacctactcaaagcaggtcaccagccaggagccctgacccaggctgcccagcctgtccttgtgtcgtctttttaatttttccttagatggtctgtcctttttgtgatttctgtataggactctttatcttgagctgtggtatttttgttttgtttttgtcttttaaattaagcctcggttgagcccttgtatattaaataaatgcatttttgtccttttttagacaaaaaaaaaa

SEQ ID NO: 6 - DNA, 2564 bp, Homo sapiens
  misc_feature: Incyte ID No: 1099593.13
cgccgcggcacttttttaattttttcgggtgccgcagcggcgacccctcggcgccgatgtccctgatccctggagcgacgacggccgctgcctaagctggaaagaggaatgccagctcctgagcaggcctcattggtggaggaggggcaaccacagacccgccaggaagctgcctccactggcccaggcatggaacccgagaccacagccaccactattctagcatccgtgaaggagcaggagcttcagtttcagcgactcacccgagaactggaagtggaaaggcagattgttgccagtcagctagaaagatgtaggcttggagcagaatcaccaagcatcgccagcaccagctcaactgagaagtcatttccttggagatcaacagacgtgccaaatactggtgtaagcaaacctagagtttctgacgctgtccagcccaacaactatctcatcaggacagagccagaacaaggaaccctctattcaccagaacagacatctctccatgaaagtgagggatcattgggtaactcaagaagttcaacacaaatgaattcttattccgacagtggataccaggaagcagggagtttccacaacagccagaacgtgagcaaggcagacaacagacagcagcattcattcataggatcaactaacaaccatgtggtgaggaattcaagagctgaaggacaaacactggttcagccatcagtagccaatcgggccatgagaagagttagttcagttccatctagagcacagtctccttcttatgttatcagcacaggcgtgtctccttcaagggggtctctgagaacttctctgggtagtggatttggctctccgtcagtgaccgacccccgacctctgaaccccagtgcatattcctccaccacattacctgctgcacgggcagcctctccgtactcacagagacccgcctccccaacagctatacggcggattgggtcagtcacctcccggcagacctccaatcccaacggaccaacccctcaataccaaaccaccgccagagtggggtccccactgaccctgacggatgcacagactcgagtagcttccccatcccaaggccaggtggggtcgtcgtcccccaaacgctcagggatgaccgccgtaccacagcatctgggaccttcactgcaaaggactgttcatgacatggagcaattcggacagcagcagtatgacatttatgagaggatggttccacccaggccagacagcctgacaggcttacggagttcctatgctagtcagcatagtcagcttgggcaagaccttcgttctgccgtgtctcccgacttgcacattactcctatatatgaggggaggacctattacagcccagtgtaccgcagcccaaaccatggaactgtggagctccaaggatcgcagacggcgttgtatcgcacaggttcagtaggtattggaaatctacaaaggacatccagccaacgaagtacccttacataccaaagaaataattatgctctgaacacaacagctacctacgcggagccctacaggcctatacaataccgagtgcaagagtgcaattataacaggcttcagcatgcagtgccggctgatgatggcaccacaagatccccatcaatagacagcattcagaaggaccccaggcgagtaccagttaggagtctctagaaggctacagtattgcaggagtcagccagttcctccattttgacttttttaagttgctaagtctattatactatcattatactatcattaattccatatatattaatacttccagttgtattccagctatataggtcattgaggttaatttcattttaaagatagattccttctttccatcctttcataataagttagagaaggcacagatccatgggaatatctgcagcattcatcactgaaatatttcatcaagacaacaacctggaatagcctcttggaattaaacaaggctttgaaagatcaatttaccctttgcccttatcctgaccgacttcttcgataacagcttcaaaaaatggatttggttattacaaactagagaaagacccgtgttacatgttttcaatcatagtggtcaacaatatataacgctgttattaaccaggtcctttgaaaacaatttgtgacatttaggagaagacagtctttataagaaattctgtctaataagcaaaagtgtttggcaaatcatagacgtttcctccttctgattttatttggccctgtagacagcattttttattaagataatatgagtcatttaatacttgattgattttgaaaaactgaccttgtccttaaagccatttaaaatattcaggaaataaagatattttgaaactaaaagaattttcatttctgaaagagtgaaattgttgctaaattttaagcagctttagtgttattttaaggcgtgtatgcaagatttcattcactcttcgcccacaaatagttgcttcactggaaaattgttataattatcaattcatttttagcagcctaccaacttgtcttaatgaatgtga

SEQ ID NO: 7 - DNA, 3085 bp, Homo sapiens
  misc_feature: Incyte ID No: 1099593.2
tggaaatctacaaaggacatccagccaacgaatacccttacataccaaagaaataattatgctctgaacacaacagctacctacgcggagccctacaggcctatacaataccgagtgcaagagtgcaattataacaggcttcagcatgcagtgccggctgatgatggcaccacaagatccccatcaatagacagcattcagaaggaccccagggagtttgcctggcgtgatcctgagttgcctgaggtcattcacatgcttcagcaccagttcccatctgttcaggcaaatgcagcggcctacctgcagcacctgtgctttggtgacaacaaagtgaagatggaggtgtgtaggttagggggaatcaagcatctggttgaccttctggaccacagagttttggaagttcagaagaatgcttgtggtgcccttcgaaacctcgtttttggcaagtctacagatgaaaataaaatagcaatgaagaatgttggtgggatacctgccttgttgcgactgttgagaaaatctattgatgcagaagtaagggagcttgttacaggagttctttggaatttatcctcatgtgatgctgtaaaaatgacaatcattcgagatgctctctcaaccttaacaaacactgtgattgttccacattctggatggaataactcttcttttgatgatgatcataaaattaaatttcagacttcactagttctgcgtaacacgacaggttgcctaaggaacctcagctccgcgggggaagaagctcggaagcaaatgcggtcctgcgaggggctggtagactcactgttgtatgtgatccacacgtgtgtgaacacatccgattacgacagcaagacggtggagaactgcgtgtgcaccctgaggaacctgtcctatcggctggagctggaggtgccccaggcccggttactgggactgaacgaattggatgacttactaggaaaagagtctcccagcaaagactctgagccaagttgctgggggaagaagaagaaaaagaaaaagaggactccgcaagaagatcaatgggatggagttggtcctatcccaggactgtcgaagtcccccaaaggggttgagatgctgtggcacccatcggtggtaaaaccatatctgactcttctagcagaaagttccaacccagccaccttggaaggctctgcagggtctctccagaacctctctgctggcaactggaagtttgcagcatatatccgggcggccgtccgaaaagaaaaggggctccccatccttgtggagcttctgagaatggataacgatagagttgtttcttccgtggcaacagccttgaggaatatggcactagatgttcgcaacaaggagctcataggcaaatacgccatgcgagacctggtcaaccggctccccggcggcaatggccccagtgtcttgtctgatgagaccatggcagccatctgctgtgctctgcacgaggtcaccagcaaaaacatggagaacgcaaaagccctggccgactcaggaggcatagagaagctggtgaacataaccaaaggcaggggcgacagatcatctctgaaagtggtgaaggcagcagcccaggtcttgaatacattatggcaatatcgggacctccggagcatttataaaaaggatgggtggaatcagaaccattttattacacctgtgtcgacattggagcgagaccgattcaaatcacatccttccttgtctaccaccaaccaacagatgtcacccatcattcagtcaggctccagcaaaccttcaccaatttacatcagttcctattcctcaccagcaagagaacaaaatagacggctacagcatcaacagctgtattatagtcaagatgactccaacagaaagaactttgatgcatacagattgtatttgcagtctcctcatagctatgaagatccttattttgatgaccgagtttcactttccagcttctactggattactcaacacagtatggactgaaatcgaccacaaattatgtagacttttattccactaaacgaccttcttatagagcagaacagtacccagggtccccagactcatgggtgtagcatcaagatgcccaacagaggaactctttctttctaaccttgttcagattgaggtgaaaagtccatcttgctgatttgatgattgaaatgtgaaagtgaagtggaaggaatgaatgaagtgtgttttttttttcttttttgaggaattatcagggaagtgaggaaatgtttgggagaggactttctaagctctatttaggtgttagatctaattacttatagattctgtagtctggtgaaggtgtgggtgacgtgatgagaggtttgagaaatgggtgaaatgaaatgggggatatgtaggtcaaatcaaattaaagatgatttttttaatgtgaataaagttatgttctgatagtttgtacagaaaaaataaaatggatgcccatgttttattgctattactaaatgtcaagattgtatgctattatgtcttgtaaatttcttttgttggtgtaaatatggaaatgccacattggttaagtgccatcatttgtaatgcaatgtgtcacttgaaaagagatttgaagaaactgacaacttcaaaaacaaatgagaagcccaaggaactgtgagcaattaaaagcaaaccgcgacaccctttgtctccaccacacatagtgtactttggaagcacaacgtccaggctggtaccgcagcgccatgcccattcctcgcctcgttcataggacacttcactgccattttctattcacataaaagaaaaataaatgtggaaatttcatccttggaaatgtgttctctattctttttaaattttctgtatgtatatggaaaagcagatttaataaacacaaatctaactgcatgttggaaacagcttaaatatatccaactattttggacttttcctagttttatatatactttgtgagatggaccacaccaaagaattaagctatgaactttccttctctgacaatctaggtatttttatttcttggaatctatttcaaatctagtac

SEQ ID NO: 8 - DNA, 616 bp, Homo sapiens
  misc_feature: Incyte ID No: 003161.7c
  unsure 610: a, t, c, g, or other
ctggtggagaatgctttgcgagtggctaccatcaacacagtaggagattttatgttattccttggcaaggtgctgatagtctgcagcacaggtttagctgggattatgctgctcaactaccagcaggactacacagtatgggtgctgcctctgatcatcgtctgcctctttgctttcctagtcgctcattgcttcctgtctatttatgaaatggtagtggatgtattattcttgtgttttgccattgatacaaaatacaatgatgggagccctggcagagaattctatatggataaagtgctgatggagtttgtggaaaacagtaggaaagcaatgaaagaagctggtaagggaggcgtcgctgattccagagagctaaagccgatgctgaagaaaaggtgactggtctcatgagccctgaagaatgaactcagaggaggttgtttacatgaggttctcccactcaccagctgttgagagtctgcgattatgaagagcaggatcttattacttcaatgaaagcatgtaacaagtttctcaaaccaccaacagccaagtggatttggtacagtgcggctgtctaataaataatcaaaagcatttgataganaaaaaa

SEQ ID NO: 9 - DNA, 2655 bp, Homo sapiens
  misc_feature: Incyte ID No: 415650.5
ctcaaaaggggccggatttccttctcctggaggcagatgttgcctctctctctcgctcggattggttcagtgcactctagaaacactgctgtggtggagaaactgggaccccaggtctggagcgaattccagcctgcagggctgataagcgaggcattagtgagattgagagagactttaccccgccgtggtggttggagggcgcgcagtagagcagcagcacaggcgcgggtcccgggaggccggctctgctcgcgccgagatgtggaatctccttcacgaaaccgactcggctgtggccaccgcgcgccgcccgcgctggctgtgcgctggggcgctggtgctggcgggtggcttctttctcctcggcttcctcttcgggtggtttataaaatcctccaatgaagctactaacattactccaaagcataatatgaaagcatttttggatgaattgaaagctgagaacatcaagaagttcttatataattttacacagataccacatttagcaggaacagaacaaaactttcagcttgcaaagcaaattcaatcccagtggaaagaatttggcctggattctgttgagctagcacattatgatgtcctgttgtcctacccaaataagactcatcccaactacatctcaataattaatgaagatggaaatgagattttcaacacatcattatttgaaccacctcctccaggatatgaaaatgtttcggatattgtaccacctttcagtgctttctctcctcaaggaatgccagagggcgatctagtgtatgttaactatgcacgaactgaagacttctttaaattggaacgggacatgaaaatcaattgctctgggaaaattgtaattgccagatatgggaaagttttcagaggaaataaggttaaaaatgcccagctggcaggggccaaaggagtcattctctactccgaccctgctgactactttgctcctggggtgaagtcctatccagatggttggaatcttcctggaggtggtgtccagcgtggaaatatcctaaatctgaatggtgcaggagaccctctcacaccaggttacccagcaaatgaatatgcttataggcgtggaattgcagaggctgttggtcttccaagtattcctgttcatccaattggatactatgatgcacagaagctcctagaaaaaatgggtggctcagcaccaccagatagcagctggagaggaagtctcaaagtgccctacaatgttggacctggctttactggaaacttttctacacaaaaagtcaagatgcacatccactctaccaatgaagtgacaagaatttacaatgtgataggtactctcagaggagcagtggaaccagacagatatgtcattctgggaggtcaccgggactcatgggtgtttggtggtattgaccctcagagtggagcagctgttgttcatgaaattgtgaggagctttggaacactgaaaaaggaagggtggagacctagaagaacaattttgtttgcaagctgggatgcagaagaatttggtcttcttggttctactgagtgggcagagttttcctttttattataggagaattcaagactccttcaagagcgtggcgtggcttatattaatgctgactcatctatagaaggaaactacactctgagagttgattgtacaccgctgatgtacagcttggtacacaacctaacaaaagagctgaaaagccctgatgaaggctttgaaggcaaatctctttatgaaagttggactaaaaaaagtccttccccagagttcagtggcatgcccaggataagcaaattgggatctggaaatgattttgaggtgttcttccaacgacttggaattgcttcaggcagagcacggtatactaaaaattgggaaacaaacaaattcagcggctatccactgtatcacagtgtctatgaaacatatgagttggtggaaaagttttatgatccaatgtttaaatatcacctcactgtggcccaggttcgaggagggatggtgtttgagctagccaattccatagtgctcccttttgattgtcgagattatgctgtagttttaagaaagtatgctgacaaaatctacagtatttctatgaaacatccacaggaaatgaagacatacagtgtatcatttgattcacttttttctgcagtaaagaattttacagaaattgcttccaagttcagtgagagactccaggactttgacaaaagcaacccaatagtattaagaatgatgaatgatcaactcatgtttctggaaagagcatttattgatccattagggttaccagacaggcctttttataggcatgtcatctatgctccaagcagccacaacaagtatgcaggggagtcattcccaggaatttatgatgctctgtttgatattgaaagcaaagtggacccttccaaggcctggggagaagtgaagagacagatttatgttgcagccttcacagtgcaggcagctgcagagactttgagtgaagtagcctaagaggattctttagagaatccgtattgaatttgtgtggtatgtcactcagaaagaatcgtaatgggtatattgataaattttaaaattggtatatttgaaataaagttgaatattatatataa

SEQ ID NO: 10 - DNA, 619 bp, Homo sapiens
  misc_feature: Incyte ID No: 204401.1
  unsure 451-468: a, t, c, g, or other
taaatgccagcattttacttgcattaacaaccctaaagctagggggtgttattatctcttattcacagggaggaaagtgagactagaagtcagcccaagatcacccctcctctgaatgggcagttggattcaaattcaggcagtctggctcacagagtccacatagtagtcttatgctgaaaggctcccctgtaaaacattaacaaagggagctaatttattttgaatgtgctcaactatttaatgatgtttacaaaaatctgtgatcattaagtttgtgtggtttaaagctaactaaatttttaaaacttgtataaaatactttgccaagttttctatgacatttatgtcttcatctggttttactcttaaattgtagactcctgtaaagagtatgtattttttttggctttgtaaatcttcttagaacataatacattgtcagagattnnnnnnnnnnnnnnnnnntgacacatattaccctatagtaaaattatataaatctacctgaacttcatttgctccacctttttatttccaagttttaaaaaatgcagcttagcctaagctttattagtatgcaaagtcaaaataatgaaaataaaataaaattaactgg

SEQ ID NO: 11 - DNA, 5423 bp, Homo sapiens
  misc_feature: Incyte ID No: 347915.14
ggcagccgggcgccccgcggggctctccgcgctgcgttcccgacccctggggggaggtgtggagtccaagcggtgcattcttgaaccatcttgtcagacgccggcggctcgcgggctgtggcgggggctgcggtcaaggccgcgctcctgggggccgccgcctgggagggtgggcgcccaggcgtccctgcagccccgggtgctccgactgcgcggcggggccgcggcgcgcgcgcccgggcgtccgggcgtccgggacagtggtgccagacactcccaaatcccgagccggcccagcctcgtacggaggaccttttttttggttctgttggtgacccgttagccgccgctggggcctaacaccaagttgagggctcgcggattagccgcccgccagccgtggaaatgtgataagagcggtaccgtttgcagaaggaaatttctgatgcaactcttcgcctttgctgattgcctctccaaacgcctgcctgacgactgccttggagcatgtgcgttatggaaattaggctttggcgctgaccacaatgctgagcaggaagcagcagctgcaggcccagtgactggtagctcagtgaccagcagcccagtgaccggcagccaggtcctcacctgggtcctctcagtgaagccagggtggccgccccagcagacagtgctacagagccaactcctgacaggtgctgcagcgcagtaaatgtaatttgaagaaggcagaaggaacccatggctttagccggctgcccagattcctttttgcaccatccgtactaccaggacaaggtggagcagacacctcgcagtcaacaagacccggcaggaccaggactccccgcacagtctgaccgacttgcgaatcaccaggaggatgatgtggacctggaagccctggtgaacgatatgaatgcatccctggagagcctgtactcggcctgcagcatgcagtcagacacggtgcccctcctgcagaatggccagcatgcccgcagccagcctcgggcttcaggccctcctcggtccatccagccacaggtgtccccgaggcagagggtgcagcgctcccagcctgtgcacatcctcgctgtcaggcgccttcaggaggaagaccagcagtttagaacctcatctctgccggccatccccaatccttttcctgaactctgtggccctgggagcccccctgtgctcacgccgggttctttacctccgagccaggccgccgcaaagcaggatgttaaagtctttagtgaagatgggacaagcaaagtggtggagattctagcagacatgacagccagagacctgtgccaattgctggtttacaaaagtcactgtgtggatgacaacagctggacactagtggagcaccacccgcacctaggattagagaggtgcttggaagaccatgagctggtggtccaggtggagagtaccatggccagtgagagtaaatttctattcaggaagaattacgcaaaatacgagttctttaaaaatcccatgaatttcttcccagaacagatggttacttggtgccagcagtcaaatggcagtcaaacccagcttttgcagaattttctgaactccagtagttgtcctgaaattcaagggtttttgcatgtgaaagagctgggaaagaaatcatggaaaaagctgtatgtgtgtttgcggagatctggcctttattgctccaccaagggaacttcaaaggaacccagacacctgcagctgctggccgacctggaggacagcaacatcttctccctgatcgctggcaggaagcagtacaacgcccctacagaccacgggctctgcataaagccaaacaaagtcaggaatgaaactaaagagctgaggttgctctgtgcagaggacgagcaaaccaggacgtgctggatgacagcgttcagactcctcaagtatggaatgctcctttaccagaattaccgaatccctcagcagaggaaggccttgctgtccccgttctcgacgccagtgcgcagtgtctccgagaactccctcgtggcaatggatttttctgggcaaacaggacgcgtgatagagaatccggcggaggcccagagcgcagccctggaggagggccacgcctggaggaagcgaagcacacggatgaacatcctaggtagccaaagtcccctccacccttctaccctaagtacagtgattcacaggacacagcactggtttcacgggaggatctccagggaggaatcccacaggatcattaaacagcaagggctcgtggatgggctttttctcctccgtgacagccagagtaatccaaaggcatttgtactcacactgtgtcatcaccagaaaattaaaaatttccagatcttaccttgcgaggacgacgggcagacgttcttcagcctagatgacgggaacaccaaattctctgacctgatccagctggttgacttttaccagctgaacaaaggagtcctgccttgcaaactcaagcaccactgcatccgagtggccttatgaccgcagatgtcctctcggctgaagactggaggaagtgaacactggagtgaagaagcggtctgtgcgttggtgaagaacacacatcgattctgcacctggggacccagagcgagatgggtttgttcggtgccagccgaccaagattgactagtttgttggacttaaacgacgatttgctgctgtgaacccagcagggtcgcctcccatctgcagtcggccagaattaggggagggcatggaagatccagcggaaagttgaaaataaactggaatgatcatctatggcttgggccgcttaggaacaagaaccggagagaagtagattaggaaatgaactcttgccctggaataatcttgacaattaaaactgatatgtttactttttttgtattgatcacttttttgcactccttctttgttttcaatattgtattcagcctattgtaggagggggatgtggcgtttcaactcatataatacagaaagagttttgaatgggcagatttcaaactgaatatgggtccccaaatgttcccagagggtcctccacaccctctgccgactaccacggtgtggattcagctcccaaatgacaaacccagcccttcccagtatacttgaaaagctttcttgttaaaataaaaggtgtcactgtggtaggcatttggcatattttgtggactcagtcaagcaaccacagtctgttaatcatttctctatgctcagatgtcagatcctcttgttattagtgtgtcttgttctgcacagtgcaggagactttattcctttggaaaattcactgttccacaaacagcaggctgaatggcctcgcctctagattgacgtgggccagcctccttgagacacacctggcacccgtcatcggccagcggtggatgctgcataatccacctgggtacttcagccttgcgtttccacagccttcagcctgttctagaacgatcactgccttacccctgctgctgcagtggtgtgagtcgtttcacggctgatgtccctcgggggattaaaggatctaaagagaaaatggcacctggttgtcttcgtgctgtgtctcatgggtttccatagtgataaagacaaggaaacgctgcaggggccacaggcacaggctgatatttaaagatctttgcttgcagccctccgtcctgctgaaaacccccataagccagtgaacacagagcagctagaggctcctcctctgctggcttagggtcagaagtacctcacagtggttgtggacatggaagagttttgtcaacacaacactttgtccccgctccgggagatgagtcagatggtggcttgagttgtcacttggtcccctccgcccctcgggtggccccctttgccacgtccccttagcttagtgatcaggtgtgagagtggccatttccttacctttgatccctgtaaagcagaaaggactcctttgacaggcgacaaactactgtggtgagcagaatgatttcctttttcaagacaacacctgcctggcttctattaatgtgtgctggccatgatattgccccaaatccgccccactgaagtgttccctaaggaacagcatttctctgctcctcagtcaacccccgtagcctagagcagtgtcacaagcttcagtaaggccagtcagctggaagtcagtctaccgtatagtaacactgtatttcagtctacagaccacactctagttgttttccatgaaaggtatacaaatgaagaattttctagcaaaacatgtttttaaccatcagtgctcaattgcattttcttcctttcgcagccagtcagtctttcaaactattgacagtaagataattctcacgttcacacctggtggcaggcttcactgtagggacggacattgcagttacaccacgattccttcctcttcactggctcgaggtaaacccttttcaaggaaaaacaactctaggatttcttttttctgtgtacgtagaccagtcccatcagtgtataatctctctctcacacgcctctctccaatagacagcttgtatttgcagtatttcatatttataaatatgcgtttatttaaaaggagaacaaaagcttgactctgattcacagttttgtatgtagctggtttgacgtagtcttttgtattttccctgccgaagtgaattgttggagaatgtaaaccgcctccacgtggcggcagacttcctaaggccccagctcgctggcctcgcgctgggcggctgggaattccacctgagaacaagtcccgcaaaccggggacggaaggacatttgacttttatttttgtatttaattgacatgaatgtaaaggggacagctcagggttgttttggagcctgttgactttgtatctctgcctgtgattttcttttctaaatgaaactccatgtagcaaccaggacgaagttgagaaggaaaacgccaaatgctttggttattagagtttaataggtaagctctgttacactaggtgttagagttccagaatgttcttttgtttgctaaaccttgaagaaacatgtgcctcagcctagatgttttgtcttctcttttctgcacttaatacctgacagtatgaccgatctctgcgcctttctgggggcgggcaagctggcggtagatttgtgatgtcacagtgcaaactgcagtgactgtaaattggcctggcgtgtataaacgttttcagggaatgcagaaggtattaatgaagagacaaaacctttattccatgtgctttgcttcattctgtacatagctctttggctcgtgaacctaattgtaaactttcaggtatttttgtacaaataagggactgatgttctgtttcttgtaattagaaataaacattaatacagtgttcttcattt

SEQ ID NO: 12 - DNA, 4831 bp, Homo sapiens
  misc_feature: Incyte ID No: 997395.1
  unsure 111, 113, 130, 132, 141, 145, 147, 2752, 3076-3117, 3966: a, t, c, g, or other
gccgcctgctccgcggctctttgtctccacttggggcgggcgcccgactctgggatttcgctgcgagaacgagctgggggggccgggggcgagctctcggtttcccggccncnccccgctcgggctcggntnccccctccnccgnanctccccggcccgggctctcggcgcttccacgctctcggaatcacgacccctccctgccatgtatccgcagggcagacatccggctccccatcaacccgggcagccgggatttaaattcacggtggctgagtcttgtgacaggatcaaagacgaattccagttcctgcaagctcagtatcacagcctcaaagtggagtacgacaagctggcaaacgagaagacggagatgcagcgccattatgtgatgtactatgagatgtcctatggcttgaacattgaaatgcacaagcagacagagattgcgaagagactgaacacaattttagcacagatcatgcctttcctgtcacaagagcaccagcagcaggtggcgcaggcagtggagcgcgccaagcaggtcaccatgacggagctgaacgccatcatcgggcagcagcagctccaggcgcagcacctctcccatgccacacacggccccccggtccagttgccaccccacccgtcaggtctccagcctccaggaatccccccagtgacagggagcagctccgggctgctggcactgggcgccctgggcagccaggcccatctgacggtgaaggatgagaagaaccaccatgaactcgatcacagagagagagaatccagtgcgaataactctgtgtcaccctcggaaagcctccgggccagtgagaagcaccggggctctgcggactacagcatggaagccaagaagcggaaggcggaggagaaggacagcttgagccgatacgacagtgatggggacaagagtgatgatctggtggtggatgtttccaatgaggaccccgcaacgccccgggtcagcccggcacactcccctcctgaaaatgggctggacaaggcccgtagcctgaaaaaagatgcccccaccagccctgcctcggtggcctcttccagtagcacaccttcctccaagaccaaagaccttggtcataacgacaaatcctccacccctgggctcaagtccaacacaccaaccccaaggaacgacgccccaactccaggcaccagcacgaccccagggctcaggtcgatgccgggtaaacctccgggcatggacccgataggtataatggcctcggctctgcgcacgcccatctccatcaccagctcctatgcggcgcccttcgccatgatgagccaccatgagatgaacggctccctcaccagtcctggcgcctacgccggcctccacaacatcccaccccagatgagcgccgccgccgctgctgcagccgctgcctatggccgatcgccaatggtgagctttggagctgttggttttgaccctcaccccccgatgcgggccacaggcctcccctcaagcctggcctccattcctggaggaaaaccagcgtactcattccatgtgagtgctgatgggcagatgcagcccgtgcccttcccccacgacgccctggcaggccccggcatcccgaggcacgcccggcagatcaacacactcagccacgggggggtggtgtgtgccgtgaccatcagcaaccccagcaggcacgtctacacaggtggcaagggctgcgtgaagatctgggacatcagccagccaggcagcaagagccccatctcccagctggactgcctgaacagggacaattacatccgctcctgcaagctgctccctgatgggcgcacgctcatcgtgggcggcgaggccagcacgctcaccatctgggacctggcctcacccacgccccgcatcaaggccgagctgacgtcctcggctcccgcctgttatgccctggccattagccctgacgccaaagtctgcttctcctgctgcagcgatgggaacattgctgtctgggacctgcacaaccagaccctggtcaggcagttccagggccacacagatggggccagctgcatagacatctcccatgatggcaccaaactgtggacagggggcctggacaacacagtgcgctcctgggacctgcgggagggccgacagctacagcagcatgacttcacttcccagatcttctcgctgggctactgccccactggggagtggctggctgtgggcatggagagcagcaacgtggaggtgctgcaccacaccaagcctgacaagtaccagctgcacctgcacgagagctgcgtgctctccctcaagttcgcctactgcggcaagtggttcgtgagcactgggaaagataaccttctcaacgcctggaggacgccttatggagccagcatattccagtctaaagaatcctcgtctgtcttgagttgtgacatttcagcggatgacaaatacattgtaacaggctctggtgacaagaaggccacagtttatgaggtcatctactaaacaagaactccagcagggctgtcaaactctgggagaaaccgactcggctctgacagggagacccccaggcgaggggccccgaggatggcggaggatgggccgcaggcagccgagcgttcagggctgcgctccggccggctgagagggcacgtgccccgtcacagtctggactcctgggcctggattgatgtgtctcacagactcggaagggttctgctcctcctcctncccctgaacaatgctggcagttgctacaaatagatttattggaggcttatggctccggttcccccacagacccgctcatgagtctctgtttgttcttcccttttcttttgccctgtccctcaccttgggtcgggggtgctggagtggaccacaatgttgtgctgggggatgggggggtctctctttgccgattgtgcagtgcacaagatttgtgaaaaatgtaaataacagactcctattgcggactgatcagtgggagaggaggccccttcccaccggaaactctgagtgtgtatttcgcctgctgtatttgtaatccactcnnnnnnnnnnnnnnnnnnnnnnnnnnnnnnnnnnnnnnnnnntgctctcacctgggaagaggagacagggaggggaaccaattgaagaaagaggagaaaagtcttagagtgtggaaaaggcaaccaggttggccgtaaggtgcctgctggaatgcgtgtgcctccacacgggtctgggcatccggactgataaccagccggccagactgagggatggaaggcactgagatgggggcccgtccaggcggacacccgcagaaatggagctttctgtggtctcttgcactctggctgcctcttgccctctctgtgtctctctttcgtggtctctcccttcttcttccttcctcagcctggtctttctctttggtgcacacttagttattgttgtgagcaatggaagttcaaaggaactccctctccagctcttctgaatcttgggacacagcctaaaaaggacaaaaagttagaagacagcatagcaactcagctcagggagctaccagagaaaaatagcaactgatgtgggtgcttttttttttttttaatttgaataaaaagaattagaagtgatgtccttttataaaatgccttctcccccttcccgcctacagtctcttcctctccccttagaggggggaaagtgtataaacctacagggttgtgagtctgaaaagaggatccccctcacccccaccctgggcagagcagtgggggttggggggtgggagagggggacacagatcctggcacactgtggatatttcttgcagattgcagtctcttgtggcccaaacaggttaggtagactatcgcctctggcaggtgccaccttttggtaccaacatgttctgaggtgttaggatttgggttgggttttttttgtttgtntttttttttcctttggtctttttttttttctccttttaaagaaaagctaaaggccgctgtgagtcctggtggcaggctctccatggatgtagcatatcgaagataatttttatactgcatttttatggattattttgtaatgtgtgattccgtctgctgaggaggtgggaggggctccagggaaagccacccaccttcagtgaggttgctccccagctgagcgcaccgggcatgggatgtggaggctggcgacacaccctgtgcctctccaaggctgggcgcgtggggcgtccagagtctctctgggtctcagatgtccatctgccacctcttgttaaggctctagccagaagggagggtgagggtagaagaaagttattcccgaagaaaaaaagaatgaaaagtcattgtactgaactgtttttatatttttaaaagttactatttaaaggttggtttgattgttgcgtcttaattgcctctcctcccagtttgccagtcccgccccccgccccccgggaaaacagccaggccactgttgctgtcacattctggagcctgggccagggccatttcccatcgatgtgagctcttctcatctcacagcattccctgcgctgcttccacccccttctccccttccagatacccagcatcgcagcagggatttcacaatcccatactgtgtcgcctcccatccaagcgccagggagggtggggggtaggagctaagacttcctctggacagatgggcagggcagagttcactgaggtgaaggaagaccacaggttaacaccaaagtattgtacagctgtcaatgcaaaacttttttggaaaaaaattaaacgtaatgaacttgaagcg

SEQ ID NO: 13 - DNA, 2975 bp, Homo sapiens
  misc_feature: Incyte ID No: 332783.1
  unsure 32: a, t, c, g, or other
ccggctggctcggctggcggcctctgcctggntctcggcgccgcagtcctgcgcctctcccgcccctgtctcccgctccgcagccccgggcacggcggaggcagcggagccctgggccatcgtacctggagtagaacagaaaaattattatgtctgtgttcccttgggactcattggaaattgtacagtgacatcttctgggatttagtctggattgtgcagactggtgcttaaaatggaagtcgatattaatggagagtctagaagtaccctgaccaccttgcccttccctggggctgaggccaactccccgggaaaggcggaggcagagaagccccgctgctccagcacaccctgctccccgatgcggaggaccgtgtcaggctaccagatcctacacatggactctaactatttggttggcttcacgactggcgaggaactcctgaagttagctcagaagtgcacaggaggtgaagagagcaaagcagaagccatgccatccttacgctccaaacagctagatgcaggacttgcccgttcctctcgtttgtataaaaccagaagtaggtactaccagccatacgagattccagctgtcaatggcaggaggcgaaggcggatgccaagctcaggagacaagtgcactaaatctttaccttatgaaccttacaaggccctccatgggcctctgcctctttgtcttcttaaaggtaagagggctcactccaaatctctggactacctcaatctagataaaatgatcaaggagccagctgatacagaagtgctacagtaccagcttcaacacctaaccctccgaggggaccgtgtgtttgctaggaataatacatgaatgacttggagagagcttaaaccaatttaggtcagcctacgcttggctagaaaaaacccactgctgtactctgtacatgactcttcacactatagatggttatatcagctaagtgttcctggaacataaaaattgtttgggtcaaatttgaatacaggaatgaaatcacaggtacttgggggggggatatcattctagagcacgcaactgcaaagaaaacagaatgttgactgttagtttgtatagctttttagctaggaaaaaaaggctttggtacagtaatttcatctttatgattctgacactcaaattgggaatgttacctgcttggttgttgctgacttgatatgattcattagaaatttatatcttcagtactcaagtacttcttgaatctctgtattttactataaaatgtatgtaatgatttgttttatgaaatttagaacttgaacattgctgaattggaccactttttatttttaaatattgagtttaaatattttataactggttttgcactgaaaaaattaacatttcagattgacaagagagtaatctttcttcacttgcctcaataatgttattgagcaatgaattttttatttccgcatggaaagttattgatctctatggctgtaaaatatttctttatagcgttattaaagtgtgtcttaataaaattaaatttgggatacaaagtatttattttacaatgggtgggcgggggaaacttttccagaaagtttccaatatgacgttttcataagttgaaaaaactctccttagtgcttattttctaacttaaaattcacctggaactttaaatgggaaaggattcttttaattgtggattataggcataatactgtttgcatctgaattttctgtaagtgaataatagtttaatagaggaactcatgatttgtactattgaatgattaaactaagtatgaagtgataccattcagcatggcatcaggtcattgcagttttagttctgtgtaacacaagcactcactgaaattccagtttctaggattagtgtaggagcctaacgtgcttctactgttttaatgggttaatcctggattacttaacaatttatgtcaattgcactggtttaatttgttgctaaagaaataatgccctgggtttagtaacaaatacagctcaactattcttgaatatattttgaaaaaaaaatgtatgtaacttaccttttgtaaacgttccatttcttttttccctcatttttgactcttaaaggtgcaatttattactgaattgggatttctggcagcacagaactgctttttattttggggtctgtgagtttcttaggtattagcaatcttgcttataaaataagaacaccttttaattaatgagtgggtcattcctggtgcaattgtgatttttctttagccagaatgaatggcaaactctatttagagcaaagtaagtattagaaaaccctaggaactcttaatcaacgtttattacactttcattaaggcaaactacgtgaaagagccttggggaagttggcccatatcttactaagttgatcagatttctcgttgggctggaaatgtttcgctgttgtatattttaaagtaaattgcacctttgtaacatattgtattgacgaatgatcactaagattagctatatctatacagtcattagtttgacaagaaatagaatcctgtcagatgccaaagagtgggatttttatgtttaatgattaaacaccattatttattgacaatttaccctgtggaactgtattatttctaactatgaaataaaggggtgatgtaaacacacattgttgtgtggtgctttaaactaggtccactatcaacaggctacttactgttcaagaattccactgaagcacttattttaaggccctatttttcttaaacaaaacagtgacaacaacaatcaaaccatttacttttgatgctcattggcattttatgataaaagatgtattcatggcaatgatatgtattcaccctattaggaaacacaactggttacctatgagacctgttctgtccgtgtgcctacgtttcttaataatagctaaataaaaatttgtagcttt

SEQ ID NO: 14 - DNA, 2552 bp, Homo sapiens
  misc_feature: Incyte ID No: 422289.1
atgggattctgccctagatctgagaaagtaatggactcatccataatctcttttatagatttgaaagtgtaaacaatacacacttccttttttggaactccaattctaatatgtttctttttcattggaaattgaaaaaccaggctggttttgagattagtactagcagtgagtaaacctcctgtctgtggacttaaatccttttgaggaacatttcgttttagatttttacaagttttctaatctggcacgactttcaaactagcttaatctgttcttacagaaacctgtgtaaggacagactgcccacatacgggctccccaaataaaatggcatttttatttcttgtccctgctcgggtttcaccgaaccttggtagccataatcagaacaaatgaaacacagtcaagttgttgtgttctgtttgtttttacctgccagccagctgatgctgacatttatacaccaagatgatccaaggttttggtgacgccggtggggactgccgctatatgtgcagggtgcccgggggtcatagtaatgttaatggagtaccagaatctctaacagtgtggtcctgtgtagccacattgctacacttacagagatgctttggggcctttttggattaagacagttctaaaagaccaggcctcacctatgatctgtgtataaagaattagcatcgcactgtagatctgcaagagaaggccgcctcctgcagtgctctctcttggtgaatgctaactctgctcgagggccttttggggaaaggacagtgtaaaacccttagagaggtaagtttcccacccttccaacctctctccacctgcagcttgcttggtgctgtcaggatctggatttggggggagtctctctgtagtggaaccagtgacagaagctgttctttagaattttcaggatggctgtattctgcggtcagaatgagagagtcaagctgggcagaatctctcgccaagagttcaggtaaggtaatgtttattcactgggaatgctttccacagccagacagctatgctaacagtctcaagttttcttccagtttgtttagatttaaatgatacatttgtaactttttaaaaactaaattttggttggatttttcatgaaaacctcttttttctttatcccctaaaaaatggtttgaaatgtcattgttatttaaaaacccgatgtgttggaacttctttaatctgctgtttcctctttttccccccctttgaaagtttcgcatagtgtaaacattcactatgtcttttaccttccctgctcctcccatctgggaggcgctgatgctattacccagtgctgaaaaatggcactctaaaggtatgggaaggaaggagcccaaggcaaccacctgctgtcctttcagccttcctttggagactgctccatcagtgccgaggtgtgtgggaacaggcttcactgcaccgccatcttactgagttgcttcacgtgaggaaaagggggctttggccctgtgactcagttccacattttggattgcatactggaaaagaagccaatcttcttgctagtaaaccagcaacccggctgtatacagtggtgacccaagcaatggatataaacctaaaaatctgagggaggggagaggtggaatacagtagttcttggaatctgaagtctcctatttgatcaggttatttcctgggacttggcaaaaatctgattggtggggatctcctaggacctagtggacatctggtattaatttaatctcaggaaaaacaagaaattaacccagagagagtctgggttctggaattcagcgtagctacctccagaccgtggtgtctggcctccatttttgtctgtcattcagctctgacttacagctgcagtcacctttgctataaggcacctgggtagaagggtggatgggcttcacatcaatttttttcttcctttagggtgggggattggtttggctttcttttgttgtggctttttgttttatttttgtcaagattgatttttagatgcaaggacttgaaaagacccagaaggatgccaccagtttttccttgaggcctaggattttttattctgtcccgagcagaggtaattcctcacaacttagtgcaccagtagcaccagccattttgagcagagtacctctttggggagcttttcgttttgttttgtttttaattctctttccttagcagcaaggtcttttttcctagagaatctactccgttgcagaatcattgcaacctcaggagccctcactgattgagtgctgtcagcctgatatactactttggactctggaaacagatatgggttctattctctatttctactgtgtgtcgttaaacaaccgtcggagaccagatgacctgttagatggctagtcctgtataactcgactctgtatgtttcaatgtatgttactgcaatgcttcacctgctgtacagtgtttgtgagatgctctttgaagatggtacttttatattttttcattttcaataaaagtacattccttcccacttcctggtattt

SEQ ID NO: 15 - DNA, 3702 bp, Homo sapiens
  misc_feature: Incyte ID No: 899410.5
  unsure 904-905, 910, 1319: a, t, c, g, or other
ggtaaagatagtcggatactctcaccacttttaatacctctagtattacagttgatcagcttacctttacttgatatgatttatttctaagttcattcccctgtgttgtagcttatttcaacaattccaactagccgtttaaaattcctcaaagaagctggtcatggaacacaaaaggaagaaatacctgaggaggaattagcagaggatgttgaagagattgatcacgctgaaagggagttgcggcgtggccaaatcttgtggtttagaggtctgaacagaatccaaacacagatggatgtagtgaatgctttccagagtggaagttccattcagggggctctaaggcggcaaccctccatcgccagccagcatcatgatgtaacaaatatttctacccctacacatgtagtgttttcctcttctactgcttctactactgtggggtattcgagtggtgaatgcatttcgtagttctttatatgaagggttagaaaaaccggaatcaagaagttcgattcacaactttatgacacatcctgagtttaggatagaagattcagagcctcatatcccccttattgatgacactgatgccgaagatgatgctcctacaaaacgtaactccagtcctccaccctctcccaacaaaaataacaatgctgttgacagtggaattcaccttacaatagaaatgaacaagtctgctacctcttcatccccaggaagcccactacatagtttggaaacatcactctgattgtaagctgaatgttaacacactagctgcattgtaaagaaacaaattgaaactgggtcttttcacatattgtgatggacaagctagtattcttgtctttggacttcaacagaagacacacttgtacgaatgtagatttattgnnttaanaaaaaaaaagcaaagctttctgccagactgagggtgctttttggggggtgggagaaatgaactgacagataaacagtaactcagcgtaagtgacctgtggatcatcagtagtacccaagcatggtcctgaacagtgtattagcagagctttagtttatctcagtcctggatgggagagagagggaggagtaaaactgggcaagacaaagagccctggatcgttgaattgatagtttaatttctgctgttggctgttaataatttggattatttatgtttataaatgatacagatctgtttacaaggtttgtagatactttttttgttcctgttcatagatgggaagcttccttataactgatgcagagaaaaattagtccttcaaatactgctgtattttcagaaaaanaaaaaaaaaggggtgtttctattgaaactgtactaaatttttgcctacaatttaccttgttaaatattgtagataaattgctaatactaatagccaaatagataacactaatgctttgtttaaaaaaacgaaaaaaacaaaacaaaacaaaaaaacatgagcagtggtgttctaatgaagttatgacatctgtcctaattagtttcttaaatacatttactacttaatggttttgaagcaactgtttaatttttaaaatttttgaaaacttgctaataaccttttgttcagaatttagtagattgtttaatgcaggacatcaactacataatgaaagatgcttgaaatgcttttgttatttcaggcaaatcaaattaaatcagactatcaaactacaagagaaccttagtcttttttgtttttgtctaaacatgttagtttagtgatgtcttggtgaactgtgagtgaactgtattgatttttctaatctttagagaccttcacacagcatgagggctgttggcattttgaaaaaggttaataagtagaagcatacatgttttccttttgtttttgaaacttgtttgtaaacataaataaatatgcccttttattaaataaattcatggcaatgtttttttaaaagacatttcagcttctttactcagttctgcatatacagtgcatcagtctgttctctttgaccacaattggaatacatttcaagatggtaacagccccatgaagtaccgctttaattccttgctggtaatctaatagaatcagattaagaaaattaacacaattttaccatttgacatactcttcattgaatttagtttgtctaaaatagtctcacaggtaaaaaacataacaacaatgaccaccattgtctttgatacatttattttaattcttaagtggccaaataacagattaggtaaaatgagattacatgaaaaggttctaaaatgatatatttagatgcaataattaaccatatgctagaatgcccacctctaagccaattggattctttagctctctttttctttccttcatctaccttcttctcttttttgcctctgtctttaccctttagaaactggcatgtgttagggcccagatttcaccagatacacaatcctcaggctgacataaagtttacgaggactgctactataactgagagtgctgaccaagcaaagaaacatttagttgatggtgcttgatatttttggtgggtgggggaaatctttttctcaccatcaaatctttgcagtaatcctctgcaggtcttagaaacacattggctctgtcagcatttgtaattgtacatttattcatcaggtatttatagtgaatcatactgtaaaaaagaggtagcatgatatgctggaaagcatattagactaggagtcaagacctggtttctagtcttggttttgccattaatgtgctgcatgatcttgggaaaatcatttaccctaaataagggtggtggactatcttgaagaaccctttcaactctaaaaattgaccctatcaactggagagcccacaaggcatagggaatagagaaaagggaaatgttttcagttttcttttttattttggttatgcttaaatatgaatgtaattaccaaaagatttagaagtgcatgtgctttggaggatttgtattgagcttttacagtattcatttttcaactcaaggcaatgggctttctacaccaactctaatccataaacgggtcttatgacatctatgaagtagtagcaagacatgcttagtgtgtatttctctctttgagacactgtaatttctaccagaaatttccagagcattatgtaggtagaaaaaaatgcaagcaagctgttaaagatcttggatcccattatatagtatgtatagctgaaatctgtaattcaatcactttttctcttttatcctctaaccaaaaaattgtttaattttgcatcccaaatgtttttaatctttgtatattttttaaaaatccttttctcctcatcattgccttttttgtggttgtaaatagacttacttgcactttgaagatgagttactccttgtcatcttacaaatatgtgatatggtaattttcataacagatgtcagttttgaaccaagaattggtgatttgtttataagaaaaaaactggcttcatttctgtgaaattgctctttgaaaatttctttttacacgtgtaagccaactgagataccgtgatggtgttgatttctttcaatgatgcttaccatctattttagccactgagccttttattatttgtctatttgtaaagtttatttgtcttaactcatttaataaatatactgtttatctgtttctgaaaaaaa

SEQ ID NO: 16 - DNA, 3940 bp, Homo sapiens
  misc_feature: Incyte ID No: 404155.2
  unsure 726, 730-763, 1204, 1210: a, t, c, g, or other
ggttttcccctttatttagttgtttccagaaaaggtagaataattttttttttgtaagtagccagtaattatacattgatttttcttttttaagaaaagttacaatttaggaaagaatctcctggtatcttagttgcaactatttttttccttaaaaaaattaccaatgtgttgactattatcagaagaaatacttctcattccctatcaaatcaaactctcaaatagtgacttatgttatgtaaatgctctctgtgatacatagatataaaaaaggaaattgtaagaatccgtgaatacgcgattattctactgtgcagaataatccttttagcatagggtagatggtggatgcacaggtaagacctaaacacagataattaaagatgcaatttctcccccaaactggaactggtagtgtgacccagcttagcactggtggccaccacttctgagccattgaggaagagattgtgatataatttggatgctctgtatacaagactgaagggtagtagatggaaaaaaagccagacacaaaaagtttacagttaacacatggcctttctcttttccgtaatcatttggctcattaccctatgttcatccaacttccccaccaacaattttagttcactctgtccagtaaggctttacgctgaaaaaccttggaactggtattgcctgtcattcttactagggtcagaaccatgagacttcaaagtnctannnnnnnnnnnnnnnnnnnnnnnnnnnnnnnnnncttcctttctgaatccatccaggcatcaaaaatagaaaagaagtaaaagtcaaagaccaagatgaatttgtgcaggttactgtctaaaggcagtttaatatttacgaaatgtcacacacatacacacacactcacactctttaggatccagttacaagcgctgcgtcatccgccagatcacatggtaattgttgctatttcaaggatcaagtggcataaatctccccccccccaccccacccccttcccttggtaccatatagcgtggaagagtgagttttgtgtgatggagtgggaccaggctctctgatccaaccctctgctagcaactcggctgtcggtggggtggcgcgcgcgtattctcacggagtgactaggagagggggacgagggagggggtctcaggggaggaagggcagctctaattggtttctcaatganagatantcacctactccccagagaggctggagattagcactctgcctctcctctccatcgctttagacttctcatcctcccctcggtgcttttagtccattcagcagaagcggatcgaagcaggaggctccccgcgccgcattaggggcgcactccgccgcgctcgagtacttagcgcccattcactcgctcacccgcgctctccgctgccggctgccgtcccagccgccgccgccgccgccgccgcccgagaaaaagtttcgcggaggggctcagtgaaaaaatgagcgagctagaggaagactttgccaagattctcatgctcaaggaggagaggatcaaagagctggagaagcggctgtcagagaaggaggaagaaattcaggagctgaagaggaaactccacaaatgccagtcggtgctcccagtgccctcgacccacatcggcccccggaccacccgggcgcagggcatctcggccgagccgcagacgtacaggtccttccacgacctccgacaggcattccggaagttcaccaagtccgaaaggtccaaggatcttataaaggaagctatccttgacaatgactttatgaagaacttggagctgtcgcagatccaggagattgtggattgtatgtacccggtggagtatggcaaggacagttgcatcatcaaagaaggagacgtggggtcactggtgtatgtcatggaagatggtaaggttgaagttacaaaagaaggtgtgaagttgtgtaccatgggtccaggaaaagtgtttggggaattggctattctttacaactgtacccggacagcgaccgtcaagactcttgtaaatgtaaaactctgggccattgatcgacaatgttttcaaacaataatgatgaggacaggactcatcaagcataccgagtatatggaatttttaaaaagcgttccaacattccagagccttcctgaagagatcctcagcaagcttgctgatgtccttgaagagacccactatgaaaatggagaatatattatcaggcaaggtgcaagaggggacaccttctttatcatcagcaaaggaacggtaaatgtcactcgtgaagactcaccgagtgaagacccagtctttcttagaactttaggaaaaggagactggtttggagagaaagccttgcagggggaagatgtgagaacagcaaacgtaattgctgcagaagctgtaacctgccttgtgattgacagagactcttttaaacatttgattggagggctggatgatgtttctaataaagcatatgaagatgcagaagctaaagcaaaatatgaagctgaagcggctttcttcgccaacctgaagctgtctgatttcaacatcattgatacccttggagttggaggtttcggacgagtagaactggtccagttgaaaagtgaagaatccaaaacgtttgcaatgaagattctcaagaaacgtcacattgtggacacaagacagcaggagcacatccgctcagagaagcagatgcatgcagggggctcattccgatttcatagtgagactgtacagaacatttaaggacagcaaatatttgtatatgttgatggaagcttgtctaggtggagagctctggaccattctcagggatagaggttcgtttgaagattctacaaccagattttacacagcatgtgtggtagaagcttttgcctatctgcattccaaaggaatcatttacagggacctcaagccagaaaatctcatcctagatcaccgaggttatgccaaactggttgattttggctttgcaaagaaaataggatttggaaagaaaacatggactttttgtgggactccagagtatgtagccccagagatcatcctgaacaaaggccatgacatttcagccgactactggtcactgggaatcctaatgtatgaactcctgactggcagcccacctttctcaggcccagatcctatgaaaacctataacatcatattgagggggattgacatgatagaatttccaaagaagattgccaaaaatgctgctaatttaattaaaaaactatgcagggacaatccatcagaaagattagggaatttgaaaaatggagtaaaagacattcaaaagcacaaatggtttgagggctttaactgggaaggcttaagaaaaggtaccttgacacctcctataataccaagtgttgcatcacccacagacacaagtaattttgacagtttccctgaggacaacgatgaaccaccacctgatgacaactcaggatgggatatagacttctaatgtatttctcttacctgcttctgccttgctgaagacagctttttctgagacacagctgccagcaaacctgagggaaagagagaagattagtgctcggggtcaccatgatgcctttgatcgatgctgctccagtaactacagtggcattaggacttaccgcttagatgacaatagtgctctttacatgttttctgtttgaacctaaaatagcagttgacatggtggtcctgaagcaaagcctttcaccagtaaaagatgttttctattgttgcaatgaccttgctttgctctgattataatttgaaagactgtaggaaacacttcaatgtagtataagagtctgtaccttgctggaatattcaagaagatgaaagaataatatattgggtacaatagattactatggtacagaaactgggctattccctttcttcaa

SEQ ID NO: 17 - DNA, 1738 bp, Homo sapiens
  misc_feature: Incyte ID No: 412065.22
ggaacagcggcctctgacaccagcacagcaaacccgccgggatcaaagtgtaccagtcggcagcatgggctacgaaatgtgggaattgtggacccggctactccacccctctggaggccatgaaaggacccagggaagagatcgtctacctgccctgcatttaccgaaacacaggcactgaggccccagattatctggccactgtggatgttgaccccaagtctccccagtattgccaggtcatccaccggctgcccatgcccaacctgaaggacgagctgcatcactcaggatggaacacctgcagcagctgcttcggtgatagcaccaagtcgcgcaccaagctggtgctgcccagtctcatctcctctcgcatctatgtggtggacgtgggctctgagccccgggccccaaagctgcacaaggtcattgagcccaaggacatccatgccaagtgcgaactggcctttctccacaccagccactgcctggccagcggggaagtgatgatcagctccctgggagacgtcaagggcaatggcaaagggggttttgtgctgctggatggggagacgttcgaggtgaaggggacatgggagagacctgggggtgctgcaccgttgggctatgacttctggtaccagcctcgacacaatgtcatgatcagcactgagtgggcagctcccaatgtcttacgagatggcttcaaccccgctgatgtggaggctggactgtacgggagccacttatatgtatgggactggcagcgccatgagattgtgcagaccctgtctctaaaagatgggcttattcccttggagatccgcttcctgcacaacccagacgctgcccaaggctttgtgggctgcgcactcagctccaccatccagcgcttctacaagaacgagggaggtacatggtcagtggagaaggtgatccaggtgccccccaagaaagtgaagggctggctgctgcccgaaatgccaggcctgatcaccgacatcctgctctccctggacgaccgcttcctctacttcagcaactggctgcatggggacctgaggcagtatgacatctctgacccacagagaccccgcctcacaggacagctcttcctcggaggcagcattgttaagggaggccctgtgcaagtgctggaggacgaggaactaaagtcccagccagagcccctagtggtcaagggaaaacgggtggctggaggccctcagatgatccagctcagcctggatgggaagcgcctctacatcaccacgtcgctgtacagtgcctgggacaagcagttttaccctgatctcatcagggaaggctctgtgatgctgcaggttgatgtagacacagtaaaaggagggctgaagttgaaccccaacttcctggtggacttcgggaaggagccccttggcccagcccttgcccatgagctccgctaccctgggggcgattgtagctctgacatctggatttgaactccaccctcatcacccacactccctattttgggccctcacttccttggggacctggcttcattctgctctctcttggcacccgacccttggcagcatgtaccacacagccaagctgagactgtggcaatgtgttgagtcatatacatttactgaccactgttgcttgttgctcactgtgctgcttttccatgagctcttggaggcaccaagaaataaactcgtaaccctgtccttcaaaaaaaaaaaaaagg

SEQ ID NO: 18 - DNA, 217 bp, Homo sapiens
  misc_feature: Incyte ID No: 412065.2
caagggcaatggcaaagggggttttgtgctgctggatggggagacgttcgaggtgaaggggacatgggagagacctgggggtgctgcaccgttgggctatgacttctggtaccagcctcgacacaatgtcatgatcagcactgagtgggcagctcccaatgtcttacgagattgtgcagaccctgtctctaaaagatgggcttattcccttggagat

SEQ ID NO: 19 - DNA, 1503 bp, Homo sapiens
  misc_feature: Incyte ID No: 345860.21
cgctcccgccgctcctccacgctcgtgccgccccccccgcgctcccagttgacgctctgggccgccacctccgcggaccctgcagcgcaagagccaagccgccagcgctggctatgtgggccacgctgccgctgctctgcgccggggcctggctcctgggagtccccgtctgcggtgccgccgaactgtccgtgaactccttagagaagtttcacttcaagtcatggatgtctaagcaccgtaagacctacagtacggaggagtaccaccacaggctgcagacgtttgccagcaactggaggaagataaacgcccacaacaatgggaaccacacatttaaaatggcactgaaccaattttcagacatgagctttgctgaaataaaacacaagtatctctggtcagagcctcagaattgctcagccaccaaaagtaactaccttcgaggtactggtccctacccaccttccgtggactggcggaaaaaaggaaattttgtctcacctgtgaaaaatcagggtgcctgcggcagttgctggactttctccaccactggggccctggagtctgcgatcgccatcgcaaccggaaagatgctgtccttggcggaacagcagctggtggactgcgcccaggacttcaataatcacggctgccaagggggtctccccagccaggctttcgagtatatcctgtacaacaaggggatcatgggtgaagacacctacccctaccagggcaaggatggttattgcaagttccaacctggaaaggccatcggctttgtcaaggatgtagccaacatcacaatctatgacgaggaagcgatggtggaggctgtggccctctacaaccctgtgagctttgcctttgaggtgactcaggacttcatgatgtatagaacgggcatctactccagtacttcctgccataaaactccagataaagtaaaccatgcagtactggctgttgggtatggagaaaaaaatgggatcccttactggatcgtgaaaaactcttggggtccccagtggggaatgaacgggtacttcctcatcgagcgcggaaagaacatgtgtggcctggctgcctgcgcctcctaccccatccctctggtgtgagccgtggcagccgcagcgcagactggcggagaaggagaggaacgggcagcctgggcctgggtggaaatcctgccctggaggaagttgtggggagatccactgggacccccaacattctgccctcacctctgtgcccagcctggaaacctacagacaaggaggagttccaccatgagctcacccgtgtctatgacgcaaagatcaccagccatgtgccttagtgtccttcttaacagactcaaaccacatggaccacgaatattctttctgtccagaagggctactttccacatatagagctccagggactgtcttttctgtattcgctgttcaataaacattgagtgagcacctccccagatggagcatgctggtcctggaa

SEQ ID NO: 20 - DNA, 3237 bp, Homo sapiens
  misc_feature: Incyte ID No: 199101.1
ttgtctgactatttttactatagaaaattgttttacatattcatctagtttatcatgtaagtactcatctacactagcatcatccaccaaaatgatttccttcagcagtattgcaggtgaagaatagagcacactgtggacagttctaagcaacgtggaccacgcttcattatgaaaaactattatgacactggtggtgggcaggggagggcagcgcttaaatttttgttcaatacattcaggaggtcgagtgtctggtccaagatctcggtgcaaagaaatcctgtcacttgcgaaagcattaaagcagtgtttagcttccccacgttccttttccttttgctcttcaacacttaaattggttgtcttgaatgctttaccagaagcaccaggtgcatttgaagcctgtccttgaccgtccacctcaggattcaaatgcacctggtgcttctggtaaagcattcaagacaaccaatttaagtgttgaagagcaaaaggaaaaggaacgtggggaagctaaacactgctttaatgctttcgcaagtgacaggatttctttgcaccgagatcttggaccagacactcgacctcctgaatgtattgaacaaaaatttaagcgctgccctcccctgcccaccaccagtgtcataatagtttttcataatgaagcgtggtccacgttgcttagaactgtccacagtgtgctctattcttcacctgcaatactgctgaaggaaatcattttggtggatgatgctagtgtagatgagtacttacatgataaactagatgaatatgtaaaacaattttctatagtaaaaatagtcagacaaagagaaagaaaaggtctgatcactgctcggttgctaggagcaacagtcgcaacagctgaaacgctcacatttttagatgctcactgtgagtgtttctatggttggctagaacctctgttggccagaatagctgagaactacacggctgtcgtaagtccagatattgcatccatagatctgaacacgtttgaattcaacaaaccttctccttatggaagtaaccataaccgtggaaattttgactggagtctttcatttggctgggagtcgcttcctgatcatgagaagcaaagaaggaaagatgaaacctacccaattaaaacacccacttttgcaggaggacttttttccatatcaaaagaatattttgagtatattggaagctatgatgaagaaatggaaatctggggaggtgaaaatatagaaatgtctttcagagtatggcaatgtggtgggcagttggagattatgccttgctctgttgttggacatgtttttcgcagcaaaagccctcatagctttccaaaaggcactcaggtgattgctagaaaccaagttcgccttgcagaagtctggatggatgaatacaaggaaatattttataggagaaatacagatgcagcaaaaattgttaaacaaaaagcatttggtgatctttcaaaaagatttgaaataaaacaccgccttcagtgtaaaaattttacatggtatctgaacaacatttatccagaggtgtatgtgccagaccttaatcctgttatatctggatacattaaaagcgttggtcagcctctatgtctggatgttggagaaaacaatcaaggaggcaaaccattaattatgtatacatgtcatggacttgggggaaaccagtactttgaatactctgctcaacatgaaattcggcacaacatccagaaggaattatgtcttcatgctgctcaaggtctcgttcagctgaaggcatgtacctacaaaggtcacaagacagttgtcactggagagcagatatgggagatccagaaggatcaacttctatacaatccattcttaaaaatgtgcctttcagcaaatggagagcatccaagtttagtgtcatgcaacccatcagatccactccaaaaatggatacttagccaaaatgattaagtgttccttaaaattaagttgaaaaaggaaatattctttctcataaaactgtgactaggcatacactgtagtttttgaaaattatgcaaaagcagctaaatgtaacttattccaagtgcatttttcttatttatatctttatgtagcactactacagaaattctgcaagtttctgtttcaaagcacaataactagtaataccaaagactatttcaaaatgtccagatgtaggggaagagatgtttacagtatgatgaaaataattttccaagtaaagtgaagtttgtgtgttttgtacacttagggatatatatatatagctacattcacacactcacaatttaaaatatttcccctagttttttggggggataggaagaaagatttgttactgtatttttttaactacataaaaatagatcaataaatgtcagcattggcctctgtgtacaaaccaagagcttttacagatccagaatttattagtttaaaatgcaggtgaacttttttttgcgtttggtttacttgtctgtcaaatgtttccttaaacatgaaactgaataaggagaagagtatttttaacacttaaatttcttggcaaattttaaaacattttttagtctgtaatacactccacttgaagcacttaagtcttccttaaatgacttttcttaagtaatgatactgtgtgttttcccaaagcacttttaaaaaaatttttataaattactatctgttgaaaaggtgtccttttcctttcttctagtatttttttcttaccaaaattcactaatcttgaatgtttgtgatattaaatttcaaatgcagaatacttgactcatttaaagctaaattttgttactgattcaattataattgtaatggatttttgactttgtaatggattcttttcatcaaaaagccttatttttttatctatgtggaaaacacaataaaaaatcctcaacactattgtaatcatttggttaagttttttttcctcttttgggtaaaatctgtaattgataataggtgggggaaaatgaattttgtatgctgaatttctaagcgcctattgtttgtaaaaccatcagatatttcttatggcacaaaaaatgaggaatagcaaaattcctgtgttcaatatttagaaaatttgtattaatttctgataaagttccttaagcatctggatagaatggatgttttaaaaaaatttgacgcttggcttagggagatttaccacttttttttt

SEQ ID NO: 21 - DNA, 3924 bp, Homo sapiens
  misc_feature: Incyte ID No: 196606.8c
  unsure 269, 271, 273: a, t, c, g, or other
ccaccacgcccggcctggaattttaaattctatcaacagattcacataggctttttccagtacattaaagaaaaagactctcatataacagaactaagttgcatgttacctttgaggagtgaggttaaatgaattaaagcatccacacactcatatttgtaaacctttaaatgggaaattatggagagattaagatgagaaaataaaactaaagtatttataataattccagaaaagacttggaagatttcactacgtaaagtttattntnanatatatatataaaaaaaagtataacactggagcctaaaaccattctcttttgtagaatacatattggcgttgaaacagtttaaagaaatgaaatggctatctacaaaaagttagttttgattgctgtcttcccccatactttgtgtcttcacacataaagaaaattttcaaagattttatattcagcaattttttaaaaagtacactgttttccactgctatggtctttataaaggacttgacttaaaatttcaaataaaaaagaattaaggttctaggataactcttgtgtcttttaagagcatctttatacagaacaatttggaccggcatgcaggcaacttcttttgttgttacatacctgtattaggaaaattacacccattttacagaaaaatcccaaaacatatactgcaataagctcaaaacaatgtgaaaaagaccagtgtgaatggcacacaaaaatcgcctctttataaattaactggaattcatgatcatgaagtaggcacagggaaatccagtcctcagggctttgctctctggaagaacacctttaagtaatttttaaaaactttagcatcaggctgctgaagcgcttgacaaaactcctgaattatttctggagctacttgcaaggagggcaggtattcttgttgaagatactgaacacattctgggccccgtttgagatgaattgttttcagtgtcactgcacactcagataaagccaatactgtttgtgcatctgccaggtcaaaggtttgttttaaaggtgctaggaaacatgcggggacaatgtgcttataaacaaaatcagcaaatcccactggtccatctttacctccccagagttctaccaactttgagaggatgataaaacatgttttctgtgcaattggatctggatattcaactgctccttggataacagtaaccaacactctttctacattctctgcaccttgatttgctataacttcgctcatcccactgcctgtgactgtttgcaggaaagcaaagtaactcctccgcaacatctgcttctctaaagcagcagactggtcattttcttctgctggccggagcagcacttcaaaaattgcatgaagcaggggcatgaacatctgttgtaaaaacggggatacctgtatcttgaatttggccgtaatctggttgataagaggaatgaactcctggagatcttttgcttcacaatctttgagcatatgttctgaagcagatggaatgaacggaagaacttcttcctccaggcaaataatcattcgatgaaggaaagtacggactccacttctgagaatatccttttgtaagggacaactgagggctggcaagaatgtctgtaaacagtccagataaacttcggaacagccacattgtttcacagtctgtttgttgctgaaagctttactggttcgacttgcaaatccaacagcatggttaagacagtctgctagcagaggcttgcctttcttcatcttgtgccagcatcaacttttctaacagaattttaaacttctccattagtggagtcaacagattcctcattaaggcttgtttcctttctgccggatattcactattaacaatcagcactccagctgtctcataaataaaaagttgatcatcgctgctcagtaaggactggtggccattctcaggtggagaaagctctaataaatcttgtattctattcaaaatatcctcaatgaaaggattcatttgcttattgagagatttgacaaatctagaaaacaggtaagccgtcctgctccgaacttttgcactggaatgccgcagacctctgtgatctaagaaagccattagtacacatggaatgtgctgaggttcaactgtgaaaaacttttcatatctaacaacagtttcgaagaactccaatgtcacagatgtatgctgataggaactgactcctgatgttaccagagttcgcatcatatcctgcaaagcactagcttttgaaacatcacctgagaagtgagcaccatgagatactggaagagcttctgccaacatatacagcaatcttattgctacttcaacttccataaaccgtgtagtctgccaattctgcagtgtagaactaaaaactctgcgaacagaggccagtagtaactctggtgaaacttgagcaagcctgtccaacagtaacttcagttgttttctatattctacaaacatggcttcatcttcaccctcattttcaaagttatattcttcatcgtaagtcaattttttcataacggccaacatgattgcctctacattagctttttgctgatccgagagcactgtaagctgtttcaaaatatgaagataatcgtaacaaaatccaataatattagaagaaatatcatcatcctcatgaattagtagctgcaacatcagtgccacttttgtttcaatagcttgtagtgcctcttgagcattcttaatatccccattcttaattaatttactccaactaactatcaatgactgtcccattccatttaccaacttagaaaatctggccaggaagtcaacatcttcttcctggtcaatgctgaaaaacccagcagactgtaatacttgacacaaagattccactagtttcattttatcaacagggtccattcctttatttacaacttcaaataaacagtcacatgcttcttcccgtagaacttctattgacatatgacctagcagcatatttataaacctatcattggctataagggataagtctatccaagagacataagccccaactacttcaaggcactgacacgtcacttcagaattagtaaactgataattttgtaatatttggtaccatgattccaccagatttggaatgcactgttccctcatggtatcttttatgagagtattcctacgagcctcctctgatgtatgcaccacatcacgatccaccaactctgaatcaatagccatgaggattcgcaggtagagatctactccccttggatttaggtccactactgagagaatgtcaaaaaaaaacttgggccacttagtgagatactctgtaacaaaaagcaaggcgaagacttgggcggctttatttcgtataaaggtcttctctggttggggattcagcatctgagcttgcagccatgatatgagcgtctccctaattagctgttgttgaacagtggttagttctgagtatttgtatttaacttgatgttccagtacttgaaagcagaaaaacttcacatgatcatcactgtatgtcctctgggctagagcttctgcacacacctgccaggcatctggggaaatttttaactgctcaaaataggccagggccctttgtctaaagtctgaatcagcatttggatttagccctaatagagcctgttcatccatcctcgctgttatacttgtagttttctggttgtaataggcgtgccctctgatcccacagaagaatttataaacatctgccacaaaaaacaaagttgaaagaaaacattacttgataaacaaatagatgcttatcctgaataacgtaaatggataaaatcatgcaaagaagcttaaatgtttaaaaacttattttggaacttatctaaattacaactaaaagttagagcctaattc

SEQ ID NO: 22 - DNA, 2377 bp, Homo sapiens
  misc_feature: Incyte ID No: 475146.3
caagtttctgctgggtttctgaactgctgggtttctgcttgctcctctggagatgcagcgtctgttgactccagtgaagcgcattctgcaactgacaagagcggtgcaggaaacctccctcacacctgctcgcctgctcccagtagcccaccaaaggttttctacagcctctgctgtccccctggccaaaacagatacttggccaaaggacgtgggcatcctggccctggaggtctacttcccagcccaatatgtggaccaaactgacctggagaagtataacaatgtggaagcaggaaagtatacagtgggcttgggccagacccgtatgggcttctgctcagtccaagaggacatcaactccctgtgcctgacggtggtgcaacggctgatggagcgcatacagctcccatgggactctgtgggcaggctggaagtaggcactgagaccatcattgacaagtccaaagctgtcaaaacagtgctcatggaactcttccaggattcaggcaatactgatattgagggcatagataccaccaatgcctgctacggtggtactgcctccctcttcaatgctgccaactggatggagtccagttcctgggatggtcgttatgccatggtggtctgtggagacattgccgtctatcccagtggtaatgctcgtcccacaggtggggccggagctgtggctatgctgattgggcccaaggcccctctggccctggagcgagggctgaggggaacccatatggagaatgtgtatgacttctacaaaccaaatttggcctcggagtacccaatagtggatgggaagctttccatccagtgctacttgcgggccttggatcgatgttacacatcataccgtaaaaaaatccagaatcagtggaagcaagctggcagcgatcgacccttcacccttgacgatttacagtacatgatctttcatacacccttttgcaagatggtccagaagtctctggctcgcctgatgttcaatgacttcctgtcagccagcagtgacacacaaaccagcttatataaggggctggaggctttcggggggctaaagctggaagacacctacaccaacaaggacctggataaagcacttctaaaggcctctcaggacatgttcgacaagaaaaccaaggcttccctttacctctccactcacaatgggaacatgtacacctcatccctgtacgggtgcctggcctcgcttctgtcccaccactctgcccaagaactggctggctccaggattggtgccttctcttatggctctggtttagcagcaagtttcttttcatttcgagtatcccaggatgctgctccaggctctcccctggacaagttggtgtccagcacatcagacctgccaaaacgcctagcctcccgaaagtgtgtgtctcctgaggagttcacagaaataatgaaccaaagagagcaattctaccataaggtgaatttctccccacctggtgacacaaacagccttttcccaggtacttggtacctggagcgagtggacgagcagcatcgccgaaagtatgcccggcgtcccgtctaaaggtgttctgcagatccatggaaagcttcctgggaaacgtatgctagcagagcttctccccgtgaatcatatttttaagatcccactcttagctggtaaatgaatttgaatcgacatagtagccccataagcatcagccctgtagagtgaggagccatctctagcgggcccttcattcctctccatgctgcaatcactgtcctgggcttatggtgctatggactaggggtcctttgtgaaagagcaagatggagcaatggagagaagacctcttcctgaatcactggactccagaaatgtgcatgcagatcagctgttgccttcaagatccagataaactttcctgtcatgtgttagaactttattattattaatatgttaaacttctgtgctgttcctgtgaatctccaaattttgtaccttgttctaagctaatatatagcaattaaaaagagagaaagaggaaatgattcctgcgtttcttggaacccagaatacaaacccagcctaacatgcagcaagcctgctagaccttgtgggtcagagggctgggtccttgcctcacaggctgcctctgtccccttgcaattccattctatttctgccacatgccaagtgctatgacaggtacaaggcaaataagaacggtagaacacagcttcccccagcccacttccctgttctaaagacaccacatagacagagagcagcagacaggggccagcaggagctgtagttcagatcttcttggtcattccttgccgctgttatttgaacaaataaacacagcgcaaaggt

SEQ ID NO: 23 - DNA, 2185 bp, Homo sapiens
  misc_feature: Incyte ID No: 474069.8
  unsure 209: a, t, c, g, or other
gcccgcccgccggagactcccgcggcgggacccgtcaaagccccgggatgccatggatcgtcctcgttggcggcttctggacactgagccactagagggcatcggtcccggtagggccggacggcaggctccgggataccgccacgctctctatggcgcccagaagggggcggggtggcgaccgcagtcgctttggctgaggctctgcngggaagggaaggggggcttttacgtcatcaatctgcgccaactgactcccaagtccctggctttggagtgggaagtgaggtgtgggaagtaggtcgctttctgatgaattcagtggcagtgaattgagaccggagggaatctggcccctagaggctggtacttgggcccgaaacccccatctccggcggagagaccgtccgaggtaattgtctgccacgagtgcacattctgaaaacaggagattttagttcctaaaaatgggaagaacctacattgtagaagagactgttggccagtatctttcaaacataaatctccaaggaaaggcttttgtctctggccttttaataggacagtgttcgtcacaaaaggattatgtgattcttgccactagaacgccacccaaagaggagcaaagtgagaacctcaaacatcccaaagctaagttggataacttggatgaagaatgggccacagaacatgcctgccaggtatccagaatgctaccagggggacttttagttcttggagtatttattattactactttagaactggcaaatgattttcaaaatgccctgcgtagactaatgtttgctgtggaaaagtctataaatagaaagagattgtggaatttcacagaggaggaagtctcagaacgagtgacacttcacatttgtgcttctacaaaaaaaatattttgtcgaacttatgatatccatgatccaaagagttcagcaagaccagcagattggaagtatcaaagtggattatcatcctcatggctttctttagagtgtacagttcacattaatattcacatcccactttctgctacttctgtcagctatactctggagaaaaatacaaagaatggacttacacgctgggccaaggaaatagaaaatggtgtttatttgattaatggacaagttaaagatgaagattgtgacctattagaaggacagaaaaaatcttctagaggaaatactcaagcaactagtcattgttttgatgtcagagtgctaacgcagttgctcctgaattcagaccacagatccacagccacagtccagatatgtagcggttctgtaaaccttaagggtgctgtgaaatgcagagcttatatccacagcagtaaacccaaagttaaagatgctgtgcaggcagtaaagagggatatattgaacacagttgctgatcgttgtgaaatgctatttgaggatctgcttttgaatgaaattccagaaaaaaaagattctgaaaaagagttccacgtcctcccttatcgagtctttgttccccttcctggatccactgtaatgttgtgtgattataaatttgacgatgagtcagctgaagaaatcagggaccattttatggagatgttggatcacacaattcaaatagaagatttggaaattgcagaggaaacaaacacagcttgtatgagttcttctatgaatagtcaagcttcattggacaacacagatgatgaacaaccaaaacaaccaattaaaactacaatgttattgaaaattcagcaaaacataggtgtgattgcagcatttacagttgcagtccttgctgcgggtatctcctttcattacttcagtgattagggtgaggcacaaagagtttcttgatcatccagagaacattgacagacaattatgaataataaagatgttaacaatccatctgtatttaaaacactagcagccagatctgctgccatgatgcctatttggtgtgtttctgattaaaatgaaatcacaagctgccttgtttagcctgctttacattgtaggtggcccgcatttccagaaataacgttatgcatctagatggaagctgcatgtaacaaatcattattatctatttttaaaagcttcaaaatgatgggatatgatcatagattttagtcttactaatctgaatcacatattaatcaggacattaaaaactttaacag

SEQ ID NO: 24 - DNA, 1829 bp, Homo sapiens
  misc_feature: Incyte ID No: 255115.2
taagaagcattgcataagaccaggatgtctctgaaatggacgtcagtctttctgctgatacagctcagttgttactttagctctggaagctgtggaaaggtgctagtgtggcccacagaatacagccattggataaatatgaagacaatcctggaagagcttgttcagaggggtcatgaggtgactgtgttgacatcttcggcttctactcttgtcaatgccagtaaatcatctgctattaaattagaagtttatcctacatctttaactaaaaatgatttggaagattctcttctgaaaattctcgatagatggatatatggtgtttcaaaaaatacattttggtcatatttttcacaattacaagaattgtgttgggaatattatgactacagtaacaagctctgtaaagatgcagttttgaataagaaacttatgatgaaactacaagagtcaaagtttgatgtcattctggcagatgcccttaatccctgtggtgagctactggctgaactatttaacataccctttctgtacagtcttcgattctctgttggctacacatttgagaagaatggtggaggatttctgttccctccttcctatgtacctgttgttatgtcagaattaagtgatcaaatgattttcatggagaggataaaaaatatgatatatatgctttattttgacttttggtttcaagcatatgatctgaagaagtgggaccagttttatagtgaagttctaggaagacccactacattatttgagacaatggggaaagctgaaatgtggctcattcgaacctattgggattttgaatttcctcgcccattcttaccaaatgttgattttgttggaggacttcactgtaaaccagccaaacccttgcctaaggaaatggaagagtttgtgcagagctctggagaaaatggtattgtggtgttttctctggggtcgatgatcagtaacatgtcagaagaaagtgccaacatgattgcatcagcccttgcccagatcccacaaaaggttctatggagatttgatggcaagaagccaaatactttaggttccaatactcgactgtacaagtggttaccccagaatgaccttcttggtcatcccaaaaccaaagcttttataactcatggtggaaccaatggcatctatgaggcaatctaccatgggatccctatggtgggcattcccttgtttgcggatcaacatgataacattgctcacatgaaagccaagggagcagccctcagtgtggacatcaggaccatgtcaagtagagatttgctcaatgcattgaagtcagtcattaatgaccctgtctataaagagaatgtcatgaaattatcaagaattcatcatgaccaaccaatgaagcccctggatcgagcagtcttctggattgagtttgtcatgcgccacaaaggagccaagcaccttcgagtcgcagctcacaacctcacctggatccagtaccactctttggatgtgatagcattcctgctggcctgcgtggcaactgtgatatttatcatcacaaaattttgcctgttttgtttccgaaagcttgccaaaacaggaaagaagaagaaaagagattagttatatcaaaagcctgaagtggaatgactgaaagatgggactcctcctttatttcagcatggagggttttaaatggaggatttcctttttcctgtgacaaaacatcttttcacaacttaccttgttaagacaaaatttattttccagggatttaatacgtactttagttggaattattctatgtcaatgatttttaagctatgaaaaataca

SEQ ID NO: 25 - DNA, 2150 bp, Homo sapiens
  misc_feature: Incyte ID No: 255115.4
  unsure 2087, 2089, 2094, 2096-2098, 2108, 2110, 2112, 2115-2116, 2120, 2122-2123,2125, 2136: a, t, c, g, or other
ggcacgaggaaagaaacaacaactggaaaagaagcattgcataagaccaggatgtctctgaaatggatgtcagtctttctgctgatgcagctcagttgttactttagctctgggagttgtggaaaggtgctggtgtggcccacagaatacagccattggataaatatgaagacaatcctggaagagcttgttcagaggggtcatgaggtgattgtgttgacatcttcggcttctattcttgtcaatgccagtaaatcatctgctattaaattagaagtttatcctacatctttaactaaaaatgatttggaagatttttttatgaaaatgttcgatagatggacatatagtatttcaaaaaatacattttggtcatatttttcacaactacaagaattgtgttgggaatattctgactataatataaagctctgtgaagatgcagttttgaacaagaaacttatgagaaaactacaagagtcaaaatttgatgtccttctggcagatgccgttaatccctgtggtgagctgctggctgaactacttaacataccctttctgtacagtctccgcttctctgttggctacacagttgagaagaatggtggaggatttctgttccctccttcctatgtacctgttgttatgtcagaattaagtgatcaaatgattttcatggagaggataaaaaatatgatatatatgctttattttgacttttggtttcaagcatatgatctgaagaagtgggaccagttttatagtgaagttctaggaagacccactacattatttgagacaatggggaaagctgaaatgtggctcattcgaacctattgggattttgaatttcctcgcccattcttaccaaatgttgattttgttggaggacttcactgtaaaccagccaaacccttgcctaaggaaatggaagagtttgtgcagagctctggagaaaatggtattgtggtgttttctctggggtcgatgatcagtaacatgtcagaagaaagtgccaacatgatgcatcagccctgcccagatcccacaaaaggttctatggagatttgatggcaagaagccaaatactttaggttccaatactcgactgtacaagtggttaccccagaatgaccttcttggtcatcccaaaaccaaagcttttataactcatggtggaaccaatggcatctatgaggcaatctaccatgggatccctatggtgggcattcccttgtttgcggatcaacatgataacattgctcacatgaaagccaagggagcagccctcagtgtggacatcaggaccatgtcaagtagagatttgctcaatgcattgaagtcagtcattaatgaccctatctataaagagaatatcatgaaattatcaagaattcatcatgatcaaccggtgaagcccctggatcgagcagtcttctggattgagtttgtcatgcgccataaaggagccaagcaccttcgggtcgcagcccacaacctcacctggatccagtaccactctttggatgtgatagcattcctgctggcctgcgtggcaactatgatatttatgatcacaaaatgttgcctgttttgtttccgaaagcttgccaaaacaggaaagaagaagaaaagggattagttatatcaaaagcctgaagtggaatgaccaaaagatgggactcctcctttattccagcatggagggttttaaatggaggatttcctttttcctgcgacaaaacgtcttttcacaacttaccctgttaagtcaaaatttattttccaggaatttaatatgtactttagttggaattattctatgtcaatgatttttaagctatgaaaaataataatataaaaccttatgggcttatattgaaatttattattctaatccaaaagttaccccacacaaaagttactgagcttccttatgtttcacacattgtatttgatcacaaaacattaacaactccactcatagtatcaacattgttttgcaaatactcagaatattttggcttcattttgagcagaatttttgtttttaattttgccaatgaaatcttcaataattaaaaaananaaaanannnaaaaaaaaanananaannaacnanngnaaaaaaaaaangggcggccgccgac

SEQ ID NO: 26 - DNA, 2024 bp, Homo sapiens
  misc_feature: Incyte ID No: 216331.1
  unsure 164-227: a, t, c, g, or other
gtgagactgtctcaagaaaaaatgaaaagtaattattattagagaaaaattaaacaataataaaatttaggccgtatcatctattattttctatatgcatagagaaaagtgaaagaatatacatattttgggaaaatgcctaggagctattacataaaataacnnnnnnnnnnnnnnnnnnnnnnnnnnnnnnnnnnnnnnnnnnnnnnnnnnnnnnnnnnnnnnnntctacacacaaaaagtttattttccttcctcttatttgatatcagaagaatgacaggaatcagtttttaacagagatagtttttccgtttctccattgtgttaatcagagcgcagacttacattctcagtcatttatcttttctggtggagaataaaaagtcacttatagttaaagatcagaaaattatcacaccaaatccattacatatgttagaatcaataatttactcaaaaatcagcttttataggtatgttggcaccttatccaagaacttatccctgttccagtacccctgtgcttcattcagtatcagtaaccctgcaatgatttttacaaatatctttttctagtgggttttttacttagaggaaagaactttgtaatagctcttaatgtttatatataagagaagacagaatggaaaatgttttttgaagtcaaatattgcatgatgtaaagaaaaaactttaaacttaaatgagtaggttgtcctgaattacactggtaactctctacttctttattaaagaagttatagtaagatgcctttgttacctgatttcagtgtacattgtttttatgtggttttctgataatgtcctgtcagaattgtattggtttaggccaaaggccatagcaaaaacatagagaacaaatatgatcttaaaaatagattgtaacattttaaacaattagtttagtaatttgggaaatagtggatgcataatactttaacagaagtcacacatctgtaggtttatcttttgattattctcctgaggcattagatagtttttctattataagtgacagattgactcacttaatataaataagtagcatacactaaaagcttactatgtgccagatactgtgctggacacttacatagataagccattgaatccacacagcagccctgtaagaaataagtaaaatctgcataaagtgttgaaataggaatatacatttcattatgaaaaatgaatagattatgcctatctgaatcaatattgcattcaaataagtgattacttaaatcatatatcatagtttacactccttaaaaaaaggtacataaattcagtgaggtttttttcttaacatacagaagtactaaatactgcttgcagtataatattgatattggaagctgcagtttccagaataagtggagtaataactaaacagacatttaattttatttcaatatctatggaaaaaacacttattaaatctccctgtattttatgttgtctttattacagaatcacttgtctgtttgttgtgtgccacttactgacaaaactttaaacagtacttgatgccagctctctactctgtggctgtgggacctgtttcttttaggtacttgtgcttattaatctacttactaaattttcacattgacatttttggggatgatactaccatatacgaaatggaaaatgtaatatgctcagtgcttctgtaaaatgcagcaatactggtattactttacatcagtaggcatctttgacatgagcatataaatattttgttgactcagcaaaggtgacactttgtgactaaagtatcccattatatataatgttttttgaaatgttggaaattttggggaattatcaaatgtatagaagttgcatgaaggttatagagaggtgtaactgtttgttaactattacatggatttcatactaggcagtgacaactaacatgttacttcaactaaaagtgtataatgggttgtctttttatttatgaaaataaaagtaattttacttacaataaaagg

SEQ ID NO: 27 - DNA, 2857 bp, Homo sapiens
  misc_feature: Incyte ID No: 482517.3
  unsure 2828-2841, 2851: a, t, c, g, or other
gtcagtgacctgaactacctataaaaattcagcagtggtgcagtgttgcttaagtgaaaccctttggctatctagtagtttttatgctactgaaacttggattactgtatgatattcagcttgtcttgggccctctatgtagacaaacattcatattcatagtagtgttgtatactggcctgtttttataactttatttttcaaatattaacaaccactgctttcagagtggttattttgttatttttgaagcaggaaataaccatttgtatttgcacctgcgtattgcatatgaattatggtatacttggcaaatgcttttcttttacctgtgaaaattctgaaagctggtccaagctacattgcataccaaattgtgctcttatatattatttgcatcgtgtcctttttaatcaaatagcatgttttagttttattatagtagcttttgctgtaagaatgtcacttgcttatcttttattgtacttgaattcttaatcatgcttttaacattgtatttaacaaatcatttcgtattaggttccattaaaatgtcattcctttgaaaaggcaagggatttccactttcagaatttgaaaatgaaagtagcatgtttatctaaaggcagaaaatagttcggacttggtattatgaaaataagtaatggtttctggagaggatttgtttagatttgcacagatggcgatggcaccttttacttaaattaacattaatcaacagtgctaaggaaaatttacacaaaattacaagataaaacatggaaatgtgtgcctttcagtatacaaactcttgcttggtggccatttgggtaatcagaccatttgaatgcctgagagcatgtttaatttctgtggagtgccacatatggctaaaacaactctttaatgtgcaattaatttctagagtaaaatgtctgttatgtgagggggatctttatgttgggcttttctattttttaaatgttcacatttctttctgttaattaaaatgccatcataatgtcacatttacactgttgcctcttttaaaagcaaagccactttcttgttctaagattacatcaagacttgagcagtgtgtagtaattaaaatgtgtgcttaatgagcataatagattctggttttaggaaataacatatagcttttatatgaatattttcttttgctataatgaaagtcacagattttttttttcctggcttttatggaggaatgaaaagagttgtctccctctaagagtatactatttttgattctcatagcaataatgtcaccattcttatcagagggtaaataccccttgtataggaaaacagacataatttcctcttgggagttctctttatgacttagcattttcttctacttgagaaaattcctgtttttccgattatttcatcttgaactttcttttttttaagcttttgtgcaatgtaatagtttgttgatccatctttgtacattttcattttatttcatgtctttctctcacctacctgtcagaatcagctatagcagattttgaattctttagttaaaaaatagttgctttacttgtttcctcatgagtttgttaaatagctttgcattttagtcctctattatgctatgaaaattattacgaagtttatattgttccctttttaagcctgccttactcttgtcttttgtcattgtctatggtttaatgaagaacacaccaaactaacatttttgtttattttgaggaacaaaaaaacttttctcttttaagggaagttactacacattgagttagtaactactctttcagtcaaggttccttaatcagtccagtctacatcaggactatgacttggggggcggggctaatcctttttgctgttctgagctactattgtcaactgctgttgtacatactgttatgtgtaatggcgtaaatatatttattatgtttgtaaaattcattgcagatcaaggttgctcttctgtgatatatgggatattatgttttaaagaccatcttggaatacaattagagaacttagtattttgatgtactaagacctattttaagtttaatattctactttgcaaaaactttaattaaagatgttatttaaaaaaaaatgttgcttgctttgcttactagtatatggcattgttatagataattgaataaaatacaatttagaaaggaaaatgctttacattgttaatgagaattccatttaacaacaacaaaaagatgctaaattctgtaccttaaagataagtagattgagatgtcaatttgaattagtaaactgtgttacaaatgattaatactagcttttaaaaagttgtattttccaggcacacaggaatttaggttgggcgaattcacactaacaaattataactaaaaattggtataattaacattgtttttcaaaataaagattactccttgtgaaatattaataattaacatattgtattaaataagtatttctactccaaagtatagattacttaggataaaaacattgttatttctctgtttagtcaaaccacttcctcttagttcagaggttataaataattgcatattaggagaattggattactgaggtttgtattgcgtattgaatatattttgtgttattttagaagataataattagcaggtattttaattttatagttaattcagctgaatcattaagaagctcgcctttttgtatttttttatcctgttaacagactatctagaaaacatgcaaattttaactattaacataatcataataaagatatcttatttattgccagcaaaaaaaaaaannnnnnnnnnnnnnaaaaaaaaangggggg

SEQ ID NO: 28 - DNA, 1396 bp, Homo sapiens
  misc_feature: Incyte ID No: 480653.1
  unsure 194, 198, 202: a, t, c, g, or other
gccaatgatccaggagccgctcctttccactcgggaaaccttcagaggagtctcagaaaggacacggctggctgcttttctcagcgccgaagccgcgccatgctcgtcctcagaagcgccctgactcgggcgctggcctcacggacgctggcgcctcaggtaccggccaccggggtacccaagccttcacccgncggnaggngaggggcggggagtgttccggatgtgctcatcttttgctacgggacccagacaatacgatggaatattctatgaatttcgttcttattaccttaagccctcaaagatgaatgagttcctggaaaattttgagaaaaacgctcatcttcggacagctcactctgaattggttggatactggagtgtagaatttggaggcagaatgaatacagtgtttcatatttggaagtatgataattttgctcatcgaactgaagttcagaaagccttggccaaagataaggaatggcaagaacaattcctcattccaaatttggctctcattgataaacaagagagtgagattacttatctggtaccatggtgcaaattagaaaaacctccaaaagaaggagtctatgaactggccacttttcagatgaaacctggtgggccagctctgtggggtgatgcatttaaaagggcagttcatgctcatgtcaatctaggctacacaaaactagttggagtgttccacacagagtacggagcactcaacagagttcatgttctttggtggaatgagagtgcagatagtcgtgcagctgggagacataagtcccatgaggatcccagagttgtggcagctggtaagctgtttgactaggcatgaattatttttagaacaaatgtatttcagtcagtaactctatatgcctttctatgaaatgtttttccagttcgggaaagtgtcaactacctagtatctcagcagaatatgcttctgattcctacatcgttttcaccactgaaatagttttctactgaaatacaaaacatttcattaactgctataggatctgtctgctaatggtgcttaaattctcccaagaggttctcacttttatttgaaggaggtgttaagttaatttgctatgtttcttgcattatgaaggctacatctgtgctttgtaagtaccacttcaaaaaatagttctgtttactttctgcatggtatttcagtgtctgtcatacattaaaaatacttgtcactgttttaagatcttgactcttcatttgtttcagaatagctcttctactgtattctgacaactctttgctttatagcattttgttgtattcaaatgataatggtagcatttccatgcttgtgacagcatttttaagttattaatataattttatcaacctttcc

SEQ ID NO: 29 - DNA, 2032 bp, Homo sapiens
  misc_feature: Incyte ID No: 978047.1
ctgtggtcgggagtaggcagcggcgccgcgtccgctctcgcccgctctcgcccgctcgccagccggctctcctcccgccgcaggacccgcgcgccgcgctcgggggccatgcagcgcctggccatggacctgcggatgttgtcccgggagctctccctctacctggaacaccaagtccgggtggggttcttcggctcgggggtgggcttatcccttatcctgggcttcagcgtcgcttatgccttctactacctgagcagcattgccaagaaaccccagttagtgaccgggggtgagagtttcagccgcttccttcaagaccactgtcccgtggttacagaaacgtactacccgacggtctggtgctgggagggtcgaggacagaccctgcttagacctttcatcacttcgaagcccccggtgcagtacaggaatgaacttattaaaactgcagatggaggacagatttcactggactggtttgataatgataacagtacgtgttatatggatgccagcaccagacctactatcttattgttgcctggcctcacgggaacaagcaaggagtcatatatccttcatatgatccatcttagtgaagaattaggatacagatgtgtggtttttaacaacagaggagtggcgggggagaatctcttgacgccaaggacttattgttgtgctaacactgaagacttggagacagttattcaccatgtacacagcctgtacccttctgctcctttcctggcagcaggggtttcaatgggaggaatgctgcttctaaattacttgggcaaaattgggtccaaaacgcctttgatggcagctgcaactttttccgttggttggaacaccttcgcttgctcagagtcattggaaaaaccactgaactggctactttttaattactatttgacaacctgccttcagtcttcagttaataagcaccgacatatgtttgtaaaacaagttgatatggatcatgtcatgaaggctaaatccatcagagagtttgataagcgattcacttcagtcatgtttggataccaaacaattgatgattattatactgatgccagtccgagtcctagactgaagtcagtaggaattccagtattgtgtctaaattctgtggatgatgttttctcacccagtcatgctattccaatagaaactgctaagcaaaatcctaatgttgctttggtccttacttcttatggaggccatattggttttctggagggaatctggccaagacagtccacttacatggatcgtgtcttcaagcaatttgtgcaagccatggttgagcatggacatgaactctcttaacatgtagttctttgggtgcattttgtctgaaccacaattgtgaaggcagctcagcttagtgcacaaattttaactgttgtatataaagcaaataagccagcagatgggtgaagaggtccagaatgatatgcaaaaactactttttagagaaacaaaacaactttgtagcaacaaattaaatatagtattagattgttacttacgtagattttatttttactatgccttaccaagtacatccttaaacaaagtagtatgtacatgaaattgcacttaaccaaaactattgtgtaaaacaaattttaattcctcagggttttaatttaaactagtatttttttagattatttgttttaggtgatttaatggtactttaataactactaagaaatattggctatttcaatgtaagttataaggtggtacattcctaagggtatttatagttgatgataacatgaaaactgaaataagataaaatacaacgtgctaaatcttttatgtattctaactttaaaagacaagtgcaacaaagttagactgacttctatatgtgctcttttactctgataatattaaattaggactaacttatgttttataatgattataatttacatgcttatttttaaaatagtatatgtggacacatatatatcattatattaaaataaattctaccattttaaattgg

SEQ ID NO: 30 - DNA, 1908 bp, Homo sapiens
  misc_feature: Incyte ID No: 330977.1c
gaaattttagatttctttatgttttaacaaattaacaacaatgataagaggacattagcagcttttcttgggtctctttgttaacaataactcgatcctgcagccataacaggggatgtggccaagttttagctggcagaccagtaagccaatattttacacaatggatgacatttctgaaagcagaggcagagacagacccaaagtcacacatgtagtccaacaaacaagtttctgccatttttaattgtatttagagcaacaaaagattccaagattacaaaaagagaacagaacactagcgcttggagctggtcctgctgcccagtggaggccaagtgccaccgtgagaaataagccccatctaaagagatttcaagcaaaattgtttcttttaagaaaatctttgtgtgatgctttctttctctctctcttatttcttttttccttcaatattgaaaattaatttttatctctgtttacatagtctgctccctcctgctgccagattaattccaaggacagcacaagaatgtcatgtctgaggcactccctaatcaatgttccagtctagaggaaagcagaaaggtgtcactgggttgtgaggggactttttaattttttttttcttttttttgcgtgggtcattctgatggtggctgctgtcagcatccaagtggcttatgggataggacaaccccccaggcacttcactgtaggacagttagcaccaagagctaaggttgtgagataatgcaaatctggcctgtcacctctgcagagtacaggttcccatactgtgaggcagcagccagagagggaaccaccagagaaacagcatttcagaattgtctttcctttggtgtatggatatgtgtgtgttctagtctttggtgggcaatggaatctgcagctccatgacaatcttgttaagtagcttatgtgggaagtgtttcaggtcacaagggccacccattctaaggcttctcatttaattccccaggctaagagacaggtggggaaaggaaaaaacctagcaccttgctatactgaattggaatcagaagccaatcaatgcatattacctactttctggccaaatcaaatgaggataaatcaaagctgagtcaaaagctgtttttactatgaaactccacctgctaaattcaaatatctaccactctttctatgggtgaaaaaattccaaaagatttgttatctcagctgaaatgtctgaagaggagtaactaatgtggatttttctgccttcacctagaaatggttgagttgggaggtcctaggcaacagaagtgtcaatctcttaatcaaagaaaaacaccctacctgtgggcagaaatggacctgcacctacagagatacaacttctagtactctgacaagttttaacagagaaaaacacattttcatttgtcaaaatctttacagaacatatccaaaaccagaattacagcacacagacacccagtaacaagagcacctcaatctcaggtgagggaatttgtgtgaaagatagagcgcttgctccaggttccaatgcaggaaactgcccttctctcacaaggatggtgaagaccaaggaacagttctcttcttccaacagctcaggtcccattagggggccactggtcaatcacttgggtaggcttttggccccaagtttgggccttccctgtggtaaatctcagtcagttccattgagtttttatgctttccacattcatctgtcttgaactagtaaagtacaatgtatcatgtcctctactctttttatccctctgctccttcacaggacctgtgggtcaaacccaataggggagaaaacttttagttaactgatcaatccaggtgtcttgtttgttctgagagagcttccaaaacaaaactgca

SEQ ID NO: 31 - DNA, 1860 bp, Homo sapiens
  misc_feature: Incyte ID No: 343502.9
ggcagatggcagggtcctttgcaggagaggcagcggcgaaagctgcccttaggaggcagcgaggaggtgaaaccagagagcaacaagtaaatgcagcactagtgggtgggattgaggtgtgccctggtgcataaatagagactcagctgtgctggcacactcagaagcttggaccgcatcctagccgccgactcacacaaggcaggtgggtgaggaaatccagagttgccatggagaaaattccagtgtcagcattcttgctccttgtggccctctcctacactctggccagagataccacagtcaaacctggagccaaaaaggacacaaaggactctcgacccaaactgccccagaccctctccagaggttggggtgaccaactcatctggactcagacatatgaagaagctctatataaatccaagacaagcaacaaacccttgatgattattcatcacttggatgagtgcccacacagtcaagctttaaagaaagtgtttgctgaaaataaagaaatccagaaattggcagagcagtttgtcctcctcaatctggtttatgaaacaactgacaaacacctttctcctgatggccagtatgtccccaggattatgtttgttgacccatctctgacagttagagccgatatcactggaagatattcaaatcgtctctatgcttacgaacctgcagatacagctctgttgcttgacaacatgaagaaagctctcaagttgctgaagactgaattgtaaagaaaaaaaatctccaagcccttctgtctgtcaggccttgagacttgaaaccagaagaagtgtgagaagactggctagtgtggaagcatagtgaacacactgattaggttatggtttaatgttacaacaactattttttaagaaaaacaagttttagaaatttggtttcaagtgtacatgtgtgaaaacaatattgtatactaccatagtgagccatgattttctaaaaaaaaaaataaatgttttgggggtgttctgttttctccaacttggtctttcacagtggttcgtttaccaaataggattaaacacacacaaaatgctcaaggaagggacaagacaaaaccaaaactagttcaaatgatgaagaccaaagaccaagttatcatctcaccacaccacaggttctcactagatgactgtaagtagacacgagcttaatcaacagaagtatcaagccatgtgctttagcataaaagaatatttagaaaaacatcccaagaaaatcacatcactacctagagtcaactctggccaggaactctaaggtacacactttcatttagtaattaaattttagtcagattttgcccaacctaatgctctcagggaaagcctctggcaagtagctttctccttcagaggtctaatttagtagaaaggtcatccaaagaacatctgcactcctgaacacaccctgaagaaatcctgggaattgaccttgtaatcgatttgtctgtcaaggtcctaaagtactggagtgaaataaattcagccaacatgtgactaattggaagaagagcaaagggtggtgacgtgttgatgaggcagatggagatcagaggttactagggtttaggaaacgtgaaaggctgtggcatcagggtaggggagcattctgcctaacagaaattagaattgtgtgttaatgtcttcactctatacttaatctcacattcattaatatatggaattcctctactgcccagcccctcctgatttctttggcccctggactatggtgctgtatataatgctttgcagtatctgttgcttgtcttgattaacttttttggataaaaccttttttgaacagaaaaaa

SEQ ID NO: 32 - DNA, 2169 bp, Homo sapiens
  misc_feature: Incyte ID No: 903104.11c
cttcaagttttaaattattctaaagggatcaatgaaaatattgacatacaataaatattaggcttttcaaactgctagagtttttgatagtttagaaaagaaatagcaaagtgcctaagtttctatgtacgtctttttaaaatatatggttgaagaaatacacattgtacactgtatacagtagcccagctcaacagcaagtatcttctaaagcacaaataacacctccaccagtgcatatcattgataattccagtattacacagctaataggatccatgccaacctataatttctgtttaatgataatcttgcttagaattagacgctttacttgaagatactgctgccaaaagtccacttacaatttcccgtctgatttccccaacaatagactctttaatctcccgtatgacttgctgcaactcatcttgctccacatttttatgcatttcctcagcagctggcattgatgggagttttccatgcccttcttccacttcagatttaggtcctacaacttctggggctccttcagctgcatcaacttcctcagaactttccaaatctggaggtgtctgcacagagcctgttctagaaggagctgttggcgttagagccaccgatgctcggaacactttcttccttgccactaatggggttttggatttgcccactgaggcagtagaaggtactccagttcttctgttagcatgagagggaccagaacatacagaagatgattctgatgttgcttgggaaaaaacagattctgagctttctccaggaggaatttcaaatcccatttctccaagtcccaggcccaattcagacttcaggtatgactgctcctgcatcagttcagtgactggttccattacattcaatggagaagggcatgacaagttatcagcgcttctactgccacacattcccatgagtgcggaggagcggaagggtgaaggcatgcgcacagcacgaagctgctcctccaggcccagcaggcgctcctccagctgcagttccaggtcctgaagttccattcggactgaatttctcaaaccctggagctgatcaacttcaaacctctcctcctcagtcatatgatgataaaccatggtttgtgacgcagcattgccaattctaaatccatcatttgtgttctaaacaaattcagctccgcctcattacctggagctcctgaaaagtattttcataaagaggtagaacagatgatttctgagtactatatggagcagcagcaggatcaggtcctctcatcatagggtactgatttgttattttctggtctggagtagttccagtctttgagtccagtggaagtagactaactctgtgcacagcatcgagggtcagtaggtgaaggggaaagcttagtcagagagctacgagcagaaccaggagaacgtggtgccacagaagccaacagggagaaaacttggaaaaggaaaaggtagtcaacatgttcaaatagcagagagaaagagagaaagaactttaagagggaagattttttaataatagaaatgacaaaagattctagactaaaacaaagacagtggatgatagactaaaaatgggaggatacttaacgagaaaaatctctcctcttggaaaggagacagacttgtgagcagagaaatcgactttgatcagggttagttacagcttctcccttgaaacaggagggaagatagaaaacgaaggcagatgcagattaagtttagacatgtcagaaaataaagctgaggtagttcatacttgatgtgccttagcttctctgtgaattaaaaagtgctcagagcagtaaaagaaaaaagctaatgataacatactttttctcatacctgtgaaagattctgcagtgagtttctaatatcatgtaatactcttcgcaactgcatttctatggctgaaggaggattcacagagcacactcggtaagggtaggtggcatgtctatgtgagtaaggacacccgaaaggggaagcgaaggcactacaagtagcccctgatatgttgggaacactgtgagtgctcagagttcttgtgtgctcacacaggggcctttcttgccactcagagtggatggaatgaagggaacaggtagactgagacattggtggtggagcaagccgtgaacaggta

SEQ ID NO: 33 - DNA, 1297 bp, Homo sapiens
  misc_feature: Incyte ID No: 898068.6
agttcgagcagatccaggacaacgtccggagacagccgagtatcgtgggctgaggcacgggccccccacgtgtgccggcccatcaccgtggccttgctgatgcgcctcctgcagcagctgacgggcatcacgcccatcctggtctacctgcagtccatcttcgacagcaccgctgtcctgctgccccccaaggacgacgcagccatcgttggggccgtgcggctcctgtccgtgctgatcgccgccctcaccatggacctcgcaggccgcaaggtgctgctcttcgtctcagcggccatcatgtttgctgccaacctgactctggggctgtacatccactttggccccaggcctctgagccccaacagcactgcgggcctggaaagcgagtcctggggggacttggcgcaccctggcagcacccgctggctacctcaccctggtgcccctgctggccaccatgctcttcatcatgggctacgccgtgggctggggtcccatcacctggctgctcatgtctgaggtcctgcccctgcgtgcccgtggcgtggcctcagggctctgcgtgctggccagctggctcaccgccttcgtcctcaccaagtccttcctgccagtggtgagcaccttcggcctccaggtgcctttcttcttcttcgcggccatctgcttggtgagcctggtgttcacaggctgctgtgtgcccgagaccaagggacggtccctggagcagatcgagtccttcttccgcacggggagaaggtccttcttgcgctaggtcaaggtccccgcctggagggggccaaacccccagtggctgggcctctgtgttggctacaaacctgcaccctgggaccaagaggcagcagtcatccctgccaccagccagagcacaggaagagcagtgtgatggggcctcagcagcgggtgcccctggctcgggacaggtagcactgctgtccagccacagccccagcccaggcagcccacagtgctgcacgtagccatgggccgcaggagtgcatacaaccctgcatccagggacacggccctgctgggtgacctcaggcctagtccctttcccttgcgtgaaggacacgccccacagaaggctacggggaggactgagaggacagggctggaggcagccaagtaacgtagtcatatcatcgcgctctgatctggtggcatctggctgtgcaaggaagacccggctttgccctcacaagtcttatgggcaccacagggaacatcctggacttaaaaagccagggcaggccgggcacagtggctcacg

SEQ ID NO: 34 - DNA, 583 bp, Homo sapiens
  misc_feature: Incyte ID No: 903104.10
  unsure 64: a, t, c, g, or other
gaaaatgatttttaatttacatttcaggagacatgtgctttcacagtttgatcctggttctttnaggtagttagagctgtaacatgaccacgtttttaacagaaatctgtctttattgtgttagacagattggttcatttgggggcaaaagcactatgagtaactatttttcactagttactcttccttacaagtgatttggacactttggtggtaacaagtaaaatttcatcctactatgtattctgtttacctgttttgttgcttcatctcaataggaatttaaattttacttaccatttttgcaaataaaattgagtagttattaaattaatggaatagatttatgtctttacaaattacatgattttaggcaataatgacaaccaggactttaacctttttagctaccaatcttaattccaagagagaagaataacatttttttatgatctccaggtcactgaactgatgcaggagcagtcatacctgaagtctgaattgggcctgggacttggagaaatgggatttgaaattcctcctggagaaagctcagaatctgttttttcccaagcaacatcag

SEQ ID NO: 35 - DNA, 2370 bp, Homo sapiens
  misc_feature: Incyte ID No: 903104.8
ataggccccaaattctgccttttaaccccttaagtgatttggaagtattcactttaacattggttttaatcctacttttacttttttgaagtaccctatgatgagaggacctgatcctgctgctgctccatatagtactcagaaatcatctgttctacctctttatgaaaatacttttcaggagctccaggtaatgaggcggagcctgaatttgtttagaacacaaatgatggatttagaattggcaatgctgcgtcagcaaaccatggtttatcatcatatgactgaggaggagaggtttgaagttgatcagctccagggtttgagaaattcagtccgaatggaacttcaggacctggaactgcagctggaggagcgcctgctgggcctggaggagcagcttcgtgctgtgcgcatgccttcacccttccgctcctccgcactcatgggaatgtgtggcagtagaagcgctgataacttgtcatgcccttctccattgaatgtaatggaaccagtcactgaactgatgcaggagcagtcatacctgaagtctgaattgggcctgggacttggagaaatgggatttgaaattcctcctggagaaagctcagaatctgttttttcccaagcaacatcagaatcatcttctgtatgttctggtccctctcatgctaacagaagaactggagtaccttctactgcctcagtgggcaaatccaaaaccccattagtggcaaggaagaaagtgttccgagcatcggtggctctaacgccaacagctccttctagaacaggctctgtgcagacacctccagatttggaaagttctgaggaagttgatgcagctgaaggagccccagaagttgtaggacctaaatctgaatctgaagtggaagaagggcatggaaaactcccatcaatgccagctgctgaggaaatgcataaaaatgtggagcaagatgagttgcagcaagtcatacgggagattaaagagtctattgttggggaaatcagacgggaaattgtaagtggacttttggcagcagtatcttcaagtaaagcgtctaattctaagcaagattatcattaaacagaaattataggttggcatggatcctattagctgtgtaatactggaattatcaatgatatgcactggtggaggtgttatttgtgctttagaagatacttgctgttgagctggggctactgtatacagtgtacaatgtgtatttcttcaaccatatattttaaaaagacgtacatagaaacttaggcactttgctatttcttttctaaactatcaaaaactctagcagtttgaaaagcctaatatttatttgtatgtcaatatttttcatttgattccctattagaattaattttaaaacttgaagacttccagacttatccaacttataaataacatatttcttcagactaacatcttaaaacactgacctctatgaggtatttactgtgcaataactgattcatttttttcagagcttgaagcatccaatgatttttccctccactgctgttaattaatgtcacttccaagaagaaaaactgttctgttgtaaaaaatataattgctcttaattcttggggaggttactaatagcagtaggatagaattttatgaggttacctacaactacttaatgtacttacactgtaagccttgttgctttacccaagacaaatgtaattttatcattgcttatgtagtatttttcttttggaaatgtgccttatgttaaacactatgtacttttactttttgcattgtccagacttctttattagatggagatgtttctttttctgtcttctagactaaatagagtatcatccaaataatggggcctatgacttgaatgaatagaaatgaataagctggtgtttgttttttcaaaatggaagtaatttagatttgttctcctcatacataaaatgattttagttcagttttaaccagtgaaaactttgtttttatgaaaaaaaaaggaaaatggtttcccatttggttttatatgtgttaaataaatgtgtaaagtaaccaccaaatgttattagaatttttcttctagcatttataattttttcaactcctattgtgtttctttgtgtgtgatattttaatcaaaagtggttgagttgttaacagtgttctttgaaagaatctctaaaaggcttataaatgtttgaaatatcacacaaaggctgatttctaaaatatatatatattaaaacaataaagtatttattttgcctaaagtgttttagtggtttcttaaactgcaacatgaagattttgaattagatttgataggtaacaaatgaggtccaaaagaattgcagcat

SEQ ID NO: 36 - DNA, 1868 bp, Homo sapiens
  misc_feature: Incyte ID No: 412065.21
  unsure 1841: a, t, c, g, or other
cagcggcctctgacaccagcacagcaaacccgccgggatcaaagtgtaccagtcggcagcatggctacgaaatgtgggaattgtggacccggctactccacccctctggaggccatgaaaggacccagggaagagatcgtctacctgccctgcatttaccgaaacacaggcactgaggccccagattatctggccactgtggatgttgaccccaagtctccccagtattgccaggttaggcggggcttgggcgccagctactttgagaccatagctgccctcatccctggccctgggcccccccttcccagctccatccttcttggccctccctggggatgcttgtgcacgctcaacctgggacaaggggagtgctgaaatccagcctgtgccgtgcttccaaaccaaaatgagtccacaggggcgcctcttccaaaagtggacagaggtgtggcctgggggagcaccacctctccccgcatcctaggtcatccaccggctgcccatgcccaacctgaaggacgagctgcatcactcaggatggaacacctgcagcagctgcttcggtgatagcaccaagtcgcgcaccaagctggtgctgcccagtctcatctcctctcgcatctatgtggtggacgtgggctctgagccccgggccccaaagctgcacaaggtcattgagcccaaggacatccatgccaagtgcgaatggcctttctccacaccagccactgcctggccagcggggaagtgatgatcagctccctgggagacgtcaagggcaatggcaaagggggttttgtgctgctggatggggagacgttcgaggtgaaggggacatgggagagacctgggggtgctgcaccgttgggctatgacttctggtaccagcctcgacacaatgtcatgatcagcactgagtgggcagctcccaatgtcttacgagatggcttcaaccccgctgatgtggaggctggactgtacgggagccacttatatgtatgggactggcagcgccatgagattgtgcagaccctgtctctaaaagatgggcttattcccttggagatccgcttcctgcacaacccagacgctgcccaaggctttgtgggctgcgcactcagctccaccatccagcgcttctacaagaacgagggaggtacatggtcagtggagaaggtgatccaggtgccccccaagaaagtgaagggctggctgctgcccgaaatgccaggcctgatcaccgacatcctgctctccctggacgaccgcttcctctacttcagcaactggctgcatggggacctgaggcagtatgacatctctgacccacagagaccccgcctcacaggacaggtggagaccctggcaggaggagcagaagggaaggaaggaaagagaagagaagctggggatggggtggatgatctgaagcagctgcaggatgttgagggaggtgcaggaaaagcagacatgtgtgctgtgggacagcacaggcccaggactgtccaggccagggatgggcatgcagagcatgtctgaaaggagagaggggttccagccaggcaagctgctcttcctgcaatgtttgcgcctcccactatggccctccttatactctgcacctccccatctagctcttcctcggaggcagcattgttaagggaggccctgtgcaagtgctggaggacgaggaactaaagtcccagccagagcccctagtggtcaaggtaagagcctctccccctacttgctggacccctcagacccatgcttgaggaatatgtgggggagcagctgagcatactcttggggttggggtggtgctaggatctgtgtgntaacctgggctctgaaccctggttttc

SEQ ID NO: 37 - DNA, 3471 bp, Homo sapiens
  misc_feature: Incyte ID No: 399067.1
  unsure 2849: a, t, c, g, or other
gactttgcttgaatgtttacattttctgctcgctgtcctacatatcacaatatagtgttcacgttttgttaaaactttggggtgtcaggagttgagcttgctcagcaagccagcatggctaggatgagctttgttatagcagcttgccaattggtgctgggcctactaatgacttcattaaccgagtcttccatacagaatagtgagtgtccacaactttgcgtatgtgaaattcgtccctggtttaccccacagtcaacttacagagaagccaccactgttgattgcaatgacctccgcttaacaaggattcccagtaacctctctagtgacacacaagtgcttctcttacagagcaataacatcgcgaagactgtggatgagctgcagcagcttttcaacttgactgaactagatttctcccaaaacaactttactaacattaaggaggtcgggctggcaaacctaacccagctcacaacgctgcatttggaggaaaatcagattaccgagatgactgattactgtctacaagacctcagcaaccttcaagaactctacatcaaccacaaccaaattagcactatttctgctcatgcttttgcaggcttaaaaaatctattaaggctccacctcaactccaacaaattgaaagttattgatagtcgctggtttgattctacacccaacctggaaattctcatgattggagaaaaccctgtgattggaattctggatatgaacttcaaacccctcgcaaatttgagaagcttagttttggcaggaatgtatctcactgatattcctggaaatgctttggtgggtctggatagccttgagagcctgtctttttatgataacaaactggttaaagtccctcaacttgccctgcaaaaagttccaaatttgaaattcttagacctcaacaaaaaccccattcacaaaatccaagaaggggacttcaaaaatatgcttcggttaaaagaactgggaatcaacaatatgggcgagctcgtttctgtcgaccgctatgccctggataacttgcctgaactcacaaagctggaagccaccaataaccctaaactctcttacatccaccgcttggctttccgaagtgtccctgctctggaaagcttgatgctgaacaacaatgccttgaatgccatttaccaaaagacagtcgaatccctccccaatctgcgtgagatcagtatccatagcaatcccctcaggtgtgactgtgtgatccactggattaactccaacaaaaccaacatccgcttcatggagcccctgtccatgttctgtgccatgccgcccgaatataaagggcaccaggtgaaggaagttttaatccaggattcgagtgaacagtgcctcccaatgatatctcacgacagcttcccaaatcgtttaaacgtggatatcggcacgacggttttcctagactgtcgagccatggctgagccagaacctgaaatttactgggtcactcccattggaaataagataactgtggaaaccctttcagataaatacaagctaagtagcgaaggtaccttggaaatatctaacatacaaattgaagactcaggaagatacacatgtgttgcccagaatgtccaaggggcagacactcgggtggcaacaattaaggttaacgggacccttctggatggtacccaggtgctaaaaatatacgtcaagcagacagaatcccattccatcttagtgtcctggaaagttaattccaatgtcatgacgtcaaacttaaaatggtcgtctgccaccatgaagattgataaccctcacataacatatactgccagggtcccagtcgatgtccatgaatacaacctaacgcatctgcagccttccacagattatgaagtgtgtctcacagtgtccaatattcatcagcagactcaaaagtcatgcgtaaatgtcacaaccaaaaatgccgccttcgcagtggacatctctgatcaagaaaccagtacagcccttgctgcagtaatggggtctatgtttgccgtcattagccttgcgtccattgctgtgtactttgccaaaagatttaagagaaaaaactaccaccactcattaaaaaagtatatgcaaaaaacctcttcaatcccactaaatgagctgtacccaccactcattaacctctgggaaggtgacagcgagaaagacaaagatggttctgcagacaccaagccaacccaggtcgacacatccagaagctattacatgtggtaactcagaggatattttgcttctggtagtaaggagcacaaagacgtttttgctttattctgcaaaagtgaacaagttgaagacttttgtatttttgactttgctagtttgtggcagagtggagaggacgggtggatatttcaaatttttttagtatagcgtatcgcaagggtttgacacggctgccagcgactctaggcttccagtctgtgtttggtttttattcttatcattattatgattgttattatattattattttattttagttgttgtgctaaactcaataatgctgttctaactacagtgctcaataaaatgattaatgacaggatggggttcccctgtgcttttaccagtagcatgaccccttctgaagccatccgtagaaagtactttgtccccaaaaagcaacatacggtttgaacagcatgaaactttgtagcatcgggctaagactttaactcaagaagctaaggctagacttgttaccttcgttgaatgatgttagttgactgtactgtaatgttgtatcaactgaattgaatgtttgcctttaaacaatgaattttctttttctttccttnttttttttttgttgtaatagttaaagaggcttagaacaagctaacaggcaatagaaatatgtatatcagattttttaatgtaacaaactacatgttaattgttatcttattctttttatctttagtagacacttttaaaagaaaagacaattttgttgtgtttaactcaccaacacgtggtgtataatgaagacagaactataataaattagttttgttctgattttttagaacacttgcaataatgtatcatttatagttcttgctagttgcagtggtaatatttttcacatccataaaaacaactaccaaaataaatcagctgtagcatgttgctttttaaagctaggccctaaaaggttttaattctttttctaagggaagaaatgtctattttaattaagatattttaatgaacaggatttctgtattttaaatagtactgactagcacctaatgggcagtgggagggtggttcatatgaagaaaaaaaggtgtattgttgtatcccatgcataaataaaggtaaatatatatatacaccaatatattcatatatactcacacacatccaacctgtcacacacaatgcgtgtgtatatatatatgaatatattggata

SEQ ID NO: 38 - DNA, 1849 bp, Homo sapiens
  misc_feature: Incyte ID No: 237709.11
ctcgagccggggtgcggcagcactggccaggggaagagggtgatccgacccggggaaggtcgctggggcagggcgagttgggaaagcggcagcccccgccgcccccgcagccccttctcctcctttctcccacgtcctatctgcctctcgctggaggccaggccgtgcagcatcgaagacaggaggaactggagcctcattggccggcccggggcgccggcctcgggcttaaataggagctccgggctctggctgggacccgaccgctgccggccgcgctcccgctgctcctgccgggtgatggaaaaccccagcccggccgccgccctgggcaaggccctctgcgctctcctcctggccactctcggcgccgccggccagcctcttgggggagagtccatctgttccgccagagccccggccaaatacagcatcaccttcacgggcaagtggagccagacggccttccccaagcagtaccccctgttccgcccccctgcgcagtggtcttcgctgctgggggccgcgcatagctccgactacagcatgtggaggaagaaccagtacgtcagtaacgggctgcgcgactttgcggagcgcggcgaggcctgggcgctgatgaaggagatcgaggcggcgggggaggcgctgcagagcgtgcacgcggtgttttcggcgcccgccgtccccagcggcaccgggcagacgtcggcggagctggaggtgcagcgcaggcactcgctggtctcgtttgtggtgcgcatcgtgcccagccccgactggttcgtgggcgtggacagcctggacctgtgcgacggggaccgttggcgggaacaggcggcgctggacctgtacccctacgacgccgggacggacagcggcttcaccttctcctcccccaacttcgccaccatcccgcaggacacggtgaccgagataacgtcctcctctcccagccacccggccaactccttctactacccgcggctgaaggccctgcctcccatcgccagggtgacactgctgcggctgcgacagagcccccagggccttcatccctcccgccccagtcctgcccagcagggacaatgagattgtagacagcgcctcagttccagaaacgccgctggactgcgaggtctccctgtggtcgtcctggggactgtgcggaggccactgtgggaggctcgggaccaagagcaggactcgctacgtccgggtccagcccgccaacaacgggagcccctgccccgagctcgaagaagaggctgagtgcgtccctgataactgcgtctaagaccagagccccgcagcccctggggcccccccggagccatggggtgtcgggggctcctgtgcaggctcatgctgcaggcggccgagggcacagggggtttcgcgctgctcctgaccgcggtgaggccgcgccgaccatctctgcactgaagggccctctggtggccggcacgggcattgggaaacagcctcctcctttcccaaccttgcttcttaggggcccccgtgtcccgtctgctctcagcctcctcctcctgcaggataaagtcatccccaaggctccagctactctaaattatgtctccttataagttattgctgctccaggagattgtccttcatcgtccaggggcctggctcccacgtggttgcagatacctcagacctggtgctctaggctgtgctgagcccactctcccgagggcgcatccaagcgggggccacttgagaagtgaataaatggggcggtttcggaagcgtcagtgtttccatgttatggatctctctgcgtttgaataaagactatctctgttgctcaaaaaaaaaaaaaagg

SEQ ID NO: 39 - DNA, 2127 bp, Homo sapiens
  misc_feature: Incyte ID No: 237709.5
cctcactcatttgtccacgcggatgccccattccaagcagatgtccccgagccacttacccaacaggcagacgtgccagcactgtccgtggtgtgcaactggtctggcgggaagagcccctcgtgggcagagggtccagagaggtgcggtttgccccacatttgggggcactgggccacagtgggcaggggagcacgtggccagtgccctgggctaggagagggataaagtcagctgtggccaagcagaagcagtattgcaggggaagggtggggagagactgtgctatgagctctgagcaggaggcaggacatggagagaagggtgggagacggacagagccagctgtgccagccgagggaccagagtgggcagtggggacggagcacagaccaccgcccacaagggtctctcctgtgacttctggcttcccgagggcagaggctgggatgggcatgtggcggctggcacccaggaggctccgccaggtccacgccaagccagcctggctcagctctggcttcctgctcacacgctggatgcctgtccccaggcctcctgacagggctctgcagcattggagaggcttgtggtggggccctcgctgtagaacaggcactgccagtgctcactgactcctcattgcagccagggcaggggcgctcccaccacctcggtttcagtcaggaagctggggggtgctgggatctgccagcagctctgtgtgctccccaggtgggctgcccggggccctggctctctggcttctacaccagtgcccctgcgaagcctcagcgcccaaggtctttgcaagccctgttcctgcatctctggagagggctgctccaggtgtgggcctggccagggcttccagaccagtccaggcactgcacctgcacattgacccccttctccactctctctcatccttcagtagccacaaagctggcagcagggtactcgcagatttgtgaggagagccgagcccttgctgactgtcctcccgtgcacggcagagtgaggcggggctcctggcctccttaggggctgcccgctctgggccacacagccagagaaacactgtccatctggctggcttggcctgtggggtgcaaaagaggtgttttcactttgctttggaaacatggaaattaccaagtgacttaaccataacaccaaatgatgatttttaaatttatgaaaattatggaaccagatgggacacagggaaacgagaacgatactgaaaaggtctgagtcctgtggggggtccaggtcccgcaagacagctaatcaggtgcccctgtctgttattcgggtaaatgtagcagctgggtccaggctcgggcagagcagctttctacagcaggggtgtccgccctctcccggggttcccacggggttcccaggggcctcttactctgccacgatgtgggagttccaccaccacagggacttgagcggcagctccggctcttacgtagaaacgcgcaactccagtccctaggttgtgtccgaggttgctatggtgccatcccatcttgccgctcactctgcgactgtgcggagaaacgcaagtgcccccgaagggtgggcgtggcctctgatgaatgcacacgttggtgggaggtggcttccgtttgtacgaagcgcctcttcacgcgagcgttcacctcggtctcccctttgcttggtccagttccagaaacgccgctggactgcgaggtctccctgtggtcgtcctggggactgtgcggaggccactgtgggaggctcgggaccaagagcaggactcgctacgtccgggtccagcccgccaacaacgggagcccctgccccgagctcgaagaagaggctgagtgcgtccctgataactgcgtctaagaccagagccccgcagcccctggggccccccggagccatggggtgtcgggggctcctgtgcaggctcatgctgcaggcggccgagggcacagggggtttcgcgctgctcctgaccgcggtgaggccgcgccgaccatctctgcactgaagggccctctggtggccggcacgggcattgggaaacagcctcctcctttcccaaccttgcttcttaggggcccccgtgtcccgtctgctctcagc

SEQ ID NO: 40 - DNA, 1094 bp, Homo sapiens
  misc_feature: Incyte ID No: 216437.4
ggccaggttgccatggaagctcctggagagccagtccccacccccatcccgccccagcactccctctctcttctccactatggacagagcctccactgagctgctgcctgcccgccacatacccagctgacatgggcaccgcaggaggccatgcagctgtgctggggtgatcctgggcttcctcctgttccgaggccacaactcccagcccacaatgacccagacctctagctctcagggaggccttggcggtctaagtctgaccacagagccagtttcttccaacccaggatacatcccttcctcagaggctaacaggccaagccatctgtccagcactggtaccccaggcgcaggtgtccccagcagtggaagagacggaggcacaagcagagacacatttcaaactgttccccccaattcaaccaccatgagcctgagcatgagggaagatgcgaccatcctgcccagccccacgtcagagactgtgctcactgtggctgcatttggtgttatcagcttcattgtcatcctggtggttgtggtgatcatcctagttggtgtggtcagcctgaggttcaagtgtcggaagagcaaggagtctgaagatccccagaaacctgggagttcagggctgtctgaaagctgctccacagccaatggagagaaagacagcatcacccttatctccatgaagaacatcaacatgaataatggcaaacaaagtctctcagcagagaaggttctttaaaagcaactttgggtccccatgagtccaaggatgatgcagctgccctgtgactacaaggaggaagagatggaattagtagaggcaatgaaccacatgtaaattattttattgtttcatgtctgcttctagatctaaaggacactagcattgccccagatctgggagcaagctaccaacaggggagactctttcctgtatggacagctgctgtggaaatactgcctgcttctcccacctcctcagagccacaggaaagaggaggtgacagagagagagcaaggaaagtgatgaggtggattgatactttctactttgcattaaaattattttctagcctgcaaaa

SEQ ID NO: 41 - DNA, 1882 bp, Homo sapiens
  misc_feature: Incyte ID No: 255824.52
gtacgtgccagctccccgactgccagagcctcaactgtctctgcttcgagatcaagctccgatgaggacccagggcccctgccctctggggagcggccagcccccagggcccatgtgccctcctccctgaagagcctttccccacgccactggaaccacagatggcctgccgagcacccaggcctgggaactggaagtggcagcgcagggcctggctccctgcagggcaggactcttggccggctggacggcagctcctctggagggccagaaaagagaggggctagtgctcgggcaggtgccctggcttcccttcccctccacacgtcaacgattctatttgaagttgggcaggggggtggcgctgctcaccacacacaagtgttataggaggagtctggcccttgagtaccgggtaccgcaaggggtgcctcaaccacactccgtccacggactctccgttattttaggaggtccctggccaaagatttatttctcttgacaaccaagggcctccgtctggatttccaaggaagaatttcctctgaagcaccggaacttgctactaccagcaccatgccctaccaatatccagcactgaccccggagcagaagaaggagctgtctgacatcgctcaccgcatcgtgggcacctggcaaggggcatcctggctgcagatgagtccactgggagcattgccaagcggctgcagtccattggcaccgagaacaccgaggagaaccggcgcttctaccgccagctgctgctgacagctgacgaccgcgtgaacccctgcattgggggtgtcatcctcttccatgagacactctaccagaaggcggatgatgggcgtcccttcccccaagttatcaaatccaagggcggtgttgtgggcatcaaggtagacaagggcgtggtccccctggcagggacaaatggcgagactaccacccaagggttggatgggctgtctgagcgctgtgcccagtacaagaaggacggagctgacttcgccaagtggcgttgtgtgctgaagattggggaacacaccccctcagccctcgccatcatggaaaatgccaatgttctggcccgttatgccagtatctgccagcagaatggcattgtgcccatcgtggagcctgagatcctccctgatggggaccatgacttgaagcgctgccagtatgtgaccgagaaggtgctggctgctgtctacaaggctctgagtgaccaccacatctacctggaaggcaccttggctgaagcccaacatggtcaccccaggccatgcttgcactcagaagttttctcatgaggagattgccatggcgaccgtcacagcgctgcgccgcacagtgccccccgctgtcactgggatcaccttcctgtctggaggccagagtgaggaggaggcgtccatcaacctcaatgccattaacaagtgccccctgctgaagccctgggccctgaccttctcctacggccgagccctgcaggcctctgccctgaaggcctggggcgggaagaaggagaacctgaaggctgcgcaggaggagtatgtcaagcgagccctggccaacagccttgcctgtcaaggaaagtacactccgagcggtcaggctggggctgctgccagcgagtccctcttcgtctctaaccacgcctattaagcggaggtgttcccaggctgcccccaacactccaggccctgccccctcccactcttgaagaggaggccgcctcctcggggctccaggctggcttgcccgcgctctttcttccctcgtgacagtggtgtgtggtgtcgtctgtgaatgctaagtccatcaccctttccggcacactgccaaataaacagctatttaagggggaaaaaaa

SEQ ID NO: 42 - DNA, 4256 bp, Homo sapiens
  misc_feature: Incyte ID No: 027798.1
tttaaatatattaggttatacattagtcagcattttaaagacatttcttcccaagtacgagaataggcatctttcattttcattttattttgtattacttaatcttttaagcaagcaaaaatttattctcagggtcagctgtacactttattgaccagtacttgataatctctctgtatatgatgaatacatttttatacactaacattagcattaacaggtgatagttgccatggatataatggaattatggctggactttcttttgaaagaaaacttgatgtattctgtgtgtatggtttttccccagattagtcatacagttcatttggaattcaggtacattaagctttagtgaagagtgcatgcagtaattccaatgtgactgcatgacgtggtacagacattacaggtgttgtagacagaggcacttgtctcgtgcagagggattaaattagacctgtgagattatatttggaaaaattcatgtctgtaactaacccattagtgcagtatttaatttgttactattccttcccgccaattctgtccactcctcacctcgcatcagctataaatttggaagtacttgtccaggcactcaagtgacttcatatttctctctgcccatgggaaaagagataggctttatatttccacagagtgaaaaatcctctgtcatggagcctgtcctgcaaagtggcaagagtgtggggactgtctggtgatgatgtctttcatggcatctgagtgaagagtgacaggttggctcaacttttttcctttttttctttttaattgccttgtattgtaagtattcttccctgcagtccaagtgacttttcattttttgttttaacttcaggcaaaatctttaaccactctggcctctgtttcccccaccaacggggagcagtgacatttacctccctcacagagtcactgtgaggattctatactgatttgaagtggagctgttcagaactgaaccttgtaggaaattccaagggcctttctactgaatctggtgatggggtggggccgtggcactttctctgccacagctgttcttcacagtgttggtgctaatgaggccagggtgcagggttcgattcacacgtaggccagttaacttagagaaaatctatttccttacctctagccagtcacttcctttttccgcagttgtgatgggttttgctgagccatccactctgactgatttcctctgaagtaaacatatttacaatccaaagcaattctactgacagaagtgttgccttcataatcaaacagcttgtttttccatctcctctgcaaccctaattaaatgagtacaggtctacaaaatgttttcaaggagaaaagcagcatatccttaagtgaagtattatatttttcaataaccctgtagtggcttgatgcagggaaccctgggggactttcagcgaagagctgtgctcttttctgactagattagagcgtttggagtggaagacgtcaaatgtgtagtgagatggaggttttacattgttcttctactggctgtgatgaagtgccagaatgtctctttagaacaagagttagattccccctttctccttattgccccttccgttttgacttcccctttatttatttgctgtctaattaggggccaagtctgtaaagttttgtcaaagtgagttagaagttgttttctcttactatttgtgtttaccagagttgggagataagatagtttccatgaaggtgtgtatgttttatacgatgtttgttatagggccatgcattggtaacttgaaaatagaccagcttaatgtcttcaggatgtaaaactctgactacacggcgtctctttttcatacattgcatgtaagttgttagtacctcacaagctacagaagttcagccatgagattttgtttggcaacatgaacagatttgtgtataactgcaatggccttttttccagatttccttattgactttttgtttgccttacctggggctagttttttatgctttgtacctagaaaacaaaaaattacattcgttgggctttttttcaaggttgggattaccacaccacctggaatatcatactgtggtttctgcctaaaattggcacatgtaagtattgaagaaaatggttatataattcagttgaaactcttggttattagatgttaggcatctcctgtatgtaagacacaaggccaaccacaacacagaacgatgttgacctgttaagtattctctgaaacatggccaaaatgcattttatgagcttttttttttttgctattgtaaatattagtggtttacaatgcgctttagacatatttctttaaaatgcaagcagtgagaaataagacctctctgaattagtagctctaaactgttaacatagaatgttacttggaaaaagtctggaatatgtggtgtacacaagcagtgcttcgtgaatgagtttcttagcttttatagtgcgccatgtttctcaaagtttgtttttgttgacaaaacattttataatatatatcttatgtttattttttttctcaactaattgtgtactgcactgtaaggtgaaaattagccatccattatttatcttctgtggcaatgcatttatatggttgattgggtggggaattttttgcagaaagatgcaaagtgattgggttttcgacttcctatcgcagggagcttttaagaaatattaatttcctatacatttttccaatccccatgcaaactgttcctgtttacataccttctctgttgtatcagtactttgagtgagaagacagtttatttaaaacttgagcaggctgttcagcattttttctgcttctgaaatctgtatagtacactggtttgtaatcattatgtcttcattgaaatccttgctacttctcttcctcctcaatgaaatacattatatattatctttatgtactcttaagaaaaacgagcaaggaagagtatcttcattattctcattttctctgagttggaaacaaaaacatgaaggactccaactagaagacagatatttacatttaaatagattagtgggaaaactttaagagtttccacatattagttttcattttttgagtcaagagactgctccttgtactgggagacactagtagtatatgtttgtaatgttactttaaaattatctttttattttataaggcccataaatactggttaaactctgttaaaagtgggccttctatcttggatggtttcactgccatcagccatgctgatatattagaaatggcatccctatctacttactttaatgcttaaaattatacataaaatgctttatttagaaaacctacatgatacagtggtgtcagccttgccatgtatcagtttcacttgaaatttgagaccaattaaatttcaactgtttagggtggagaaagaggtactggaaaacatgcagatgaggatatcttttatgtgcaacagtatcctttgcatgggaggagagttactcttgaaaggcaggcagcttaagtggacaatgttttgtatatagttgagaattttacgacacttttaaaaattgtgtaattgttaaatgtccagttttgctctgttttgcctgaagttttagtatttgttttctaggtggacctctgaaaaccaaaccagtacctggggaggttagatgtgtgtttcaggcttggagtgtatgagtggttttgcttgtattttcctccagagattttgaactttaataattgcgtgtgtgtttttttttttttaagtggctttgtttttttttctcaagtaaaattgtgaacatatttcctttataggggcagggcatgagttagggagactgaagagtattgtagactgtacatgtgccttcttaatgtgtttctcgacacattttttttcagtaacttgaaaattcaaaagggacatttggttaggttactgtacatcaatctatgcataaatggcagcttgttttcttgagccactgtctaaattttgtttttatagaaattttttatactgattggttcatagatggtcagttttgtacacagactgaacaatacagcactttgccaaaaatgagtgtagcattgtttaaacattgtgtgttaacacctgttctttgtaattgggttgtggtgcattttgcactacctggagttacagttttcaatctgtcagtaaataaagtgtcctttaacttcaaaaaaaaaatt

SEQ ID NO: 43 - DNA, 2396 bp, Homo sapiens
  misc_feature: Incyte ID No: 060671.7
tcaatatcctttttctaccccaggacctcttgggatcccacatgacatttagacattaatctccttaggctccatggttcaaattttaagtgagttttgcagtgccttttcagtcataccgtattataaagccttcggtctcttattatgaaagcacgtaagacatcaggtaagtaagtttgtgctatgcaagaggcattgttaatgaaaacctatggtgttatctccatagagatgaatgcatatgattttcaaaacaggagaatttaatgtcaccatttttaatattatttggcaagcactggaaaaaacctagtgtgggaaagtagtgtaacactaatgaactgtattataatgagtaagcttgggtatgagcagttattgaaaataatattgagaatacataaatttatggcacaataactgcatgtattgattcttctttacagaatgtgacagtgatgataacatgggtgccaaaaatacttcaataggagaagaatttatatccacagaagatgtggaattagaagaagctattagaagaagtcttgaggaaatgtaattaaagatattaccacacaacatcaagtggccttgaagagactgagataacgaattcttgagtttgttttctaaaggagaccagaaatccactattacaaatgtatttgaaaacatgtttttgctttcatatgttcaaaatctgatctttgttttgtatttttgtgctaatgtgcaaacatgtacagaagaaatagaatacatgttcatgcaaatataaattatgtattctaatataggtgtaacagtttcccagttaactttgaatttatatatttagatttaaaggattaaaaaaaaggaaagctcttgacagttgtttcccaaatagcattagttctttaattttatttgtactgtacaaatgatgctagtttatttttttagcagtgaaaatgaatataaaaaaggtgacataggtcaagttttccataaattctacttctcatgtggcactattatataatacctttgagatctttgtttatgtttattagaagagggtaatggaaactgatcatggaaacatttaaaattttatcagcaatgttctttgtgggtgccatgcatatgtaaattattgctttaattagagcagcacattgctaaaataaaaaatacaccttaatttttaagaaataatttaaatgaaacaatttccattccttttacctgcttagacttttatgtgacttgtatggtctcctggttaaagggaatggtgtcagaatatttgcataaaattatttttcataacagtccttttttatatattggtgtaaacataatattcttcaagaaataatgttgaaagcctactcaggaataatcttccttaactctttaaatttttatttcatgtgaagtgttttcagtttagttattcactgaattgtcagtttccttcatttggtattacatatttaattcttaaatattgaggccccattgtgagtaataaaaaatacgacataagtagaagactaagaagggcttgtcatattatctttgtgtatatgcttcatgttatttaaccagaaatgtcttatctctaaaaatttttagtagtaattatttaccaaacttaaaaacatttctataaatataaagcttttctttatatttaagacaaaatataaaggctagaatttggttccttctctgtaacactaaatattttagtgtgaaattgaatttttttattactatagtcttttcaatctataatttgtgtttttaatttcttgatatgtcacttctgttcctccctgcttgcattttttaaaaactagacattgtggcttgagaatttatcaatcatctttccgaaatgaccacattgtgcttttagtttgtatgtttaagtggtcaagcaaggctctaggaggtagtcactgagctggaccttaaacacatctgcaggagctcacaaaatgggagcaaaagaggcattccagaaagaagagtagttaagcagatgtgggggcagggcaagaggagacagcaccttgttgccagagattctacacaaaggtgtgatggacactgatgctctattaagaagcttttgtggtgtgtgtggtagagaataattaaggcttctgataagacaggaaagggatatttcatcatgactgttaagaaaaggtaactgggttgtttaatgttttaattgataattgtcactgatcgtatttctacttgttaaataattaaaaatcatcttaaaattcatactttgactttaatttagacacaaggagatgtaatcgctgtgtaacatcagagaaagctatatggattatcgtcagaagtaaatgtttctaacattg

SEQ ID NO: 44 - DNA, 3641 bp, Homo sapiens
  misc_feature: Incyte ID No: 376085.9
ctctggggcgcgggcctcagttccgggctacagcagccgacgccgagaggcaccgtttcttcttaaaagagaaacgctgcgcgcgcgaggtgggcccctgtcttccagcagctccgggcctgctcgctaggcccgggaggcgcaggcgcaggcgcagtgggggtgagggcgcgtgggggcgcacagcctctggtgcacatggcttcctccccggcggtggacgtgtcctgcaggcggcgggagaagcggcggcagctggacgcgcgccgcagcaagtgccgcatccgcctgggcggccacatggagcagtggtgcctcctcaaggagcggctgggcttctccctgcactcgcagctcgccaagttcctgttggaccggtacacttcttcaggctgtgtcctctgtgcaggtaggtaggggatggcagggggtgagagccagagggaagagggaccacagggtgacccagaaacaccctcctttcaaagggagccctgagtaagtttgggaagggtggggtgagttggggagcacagggtagtttgatggaggcaacctctgggtggggaagggagcaatgtctcaggatctagtgtgtctaggttctgaagaatgataaattggactggggctgaggttgccctggggtttgagggaacagggctccctgggtatggctctccagggtaagaggaggagacttcccagttcagcctgactgcttcccccacccctccaggtcctgagcctttgcctccaaaaggtctgcagtatctggtgctcttgtctcatgcccacagccgagagtgcagcctggtgcccgggcttcgggggcctggcggccaagatggggggcttgtgtgggagtgctcagcaggccataccttctcctggggaccctctttgagccctacaccttcagaggcacccaagccagcctcccttccacatactactcggagaagttggtgttccgaggccacgagtgggcaggagcttgcagatttggaatctgagcatgatgagaggactcaagaggccaggttgcccagtagtgagcctgatgcccccagactactgccttcccctgtcacctgcacacctaaagagggggagacaccaccagcccctgcagcactctccagtcctcttgctgtgccggccttgtcagcatcctcattgagttccagagctcctccacctgcagaagtcagggtgcagccacagctcagcaggacccctcaagcggcccagcagactgaggccctggccaggtaacctgatggctgagacagaaagggcaggggcgtcctgggatgtggccctccctcgaggccctctgctccctctttgctgcccgtagcactgggagtcaggcccagtctgctccaaccccggcctgggatgaggacactgcacaaattggccccaagagaattaggaaagctgccaaaagagagctgatgccttgtgacttccctggctgtggaaggatcttctccaaccggcagtatttgaatcaccacaaaaagtaccagcacatccaccagaagtctttctcctgcccagagccagcctgtgggaagtctttcaactttaagaaacacctgaaggagcacatgaagctgcacagtgacacccgggactacatctgtgagttctgcgcccggtctttccgcactagcagcaaccttgtcatccacagacgtatccacactggagaaaaacccctgcagtgtgagatatgcgggtttacctgccgccagaaggcttccctgaactggcaccagcgcaagcatgcagagacggtggctgccttgcgcttcccctgtgaattctgcggcaagcgctttgagaagccagacagtgttgcagcccaccgtagcaaaagtcacccagccctgcttctagcccctcaagagtcacccagtggtcccctagagccctgtcccagcatctctgcccctgggcctctgggatccagcgaggggtccaggccctctgcatctcctcaggctccaaccctgcttcctcagcaatgagctctcctccagctttggctttgggaagccagactccagggactgaaaaggagcaacaaggagagggtctgcttgagaaatgccagatgcttggtccccaggaactaaggcgacagagtgcagggtgggggcaagactgggctgtaggggagctggactactttagtcttcctaaaggacagggctgggtgacttttgctacggtgggctgcaacactgtctggcttctcaaagcgcttgccgcagaattcacaggggaagcgcaaggcagccaccgtctctgcatgcttgcgctggtgccagttcagggaagccttctggcggcaggtaaacccgcatatctcacactgcaggggtttttctccagtgtggatacgtctgtggatgacaaggttgctgctagtgcggaaagaccgggcgcagaactcacagatgtagtcccgggtgtcactgtgcagcttcatgtgctccttcaggtgtttcttaaagttgaaagacttcccacaggctggctctgggcaggagaaagacttctggtggatgtgctggtactttttgtggtgattcaaatactgccggttggagaagatccttccacagccagggaagtcacaaggcatcagctctcttttggcagctttcctgaggagaagaatggaaaggagcagcatgactcctgcctgcccttctctgcctccctcctctcggccctccccagaaccccatctccctaagtcctacctaattctcttggggccaatttgtgcagtgtcctcatcccaggccggggttggagcagactgggcctgactcccagtgctggccagggcctcagtctgctgggccgcttgaggggtcctgctgagctgtggctgcaccctgacttctgcaggtggaggagctctggaactcaatgaggatgctgacaaggccggcacagcaagaggactggagagtgctgcaggggctggtggtgtctccccctctttaggtgtgcaggtgacaggggaaggcagtagtctgggggcatcaggctcactatcatctggggaggagctgtaggtccataagctggcatcactgagcatctcctcttcatcctcatcattgtcctcttcttcctcaccctcttcctctcctggaggtgggaaggtctctggtgggggtcccaccctcctgggcaacctggcctcttgagtcctctcatcatgctcagattccaaatctgcaagctcctgcccactcgtggcctcggaacaccaacttctccgagtagtatgtggaagggaggctggcttgggtgcctctgaaggtgtagggctcaaagagggtccccaggagaaggtatggcctgctgagcactcccacacaagccccccatcttggccgccaggcccccgaagcccgggcaccaggctgcactctcggctgtgggcatgagacaagagcaccagatactgcagaccttttggaggcaaaggctcaggacctgcacagaggacacagcctgaagaagtgtaccggtccaacaggaacttggcgagctgcgagtgcagggagaagcccagccgctccttgaggaggcaccactgctccatg

SEQ ID NO: 45 - DNA, 956 bp, Homo sapiens
  misc_feature: Incyte ID No: 404467.1
  unsure 446: a, t, c, g, or other
ctattttttcagcagcaactctcctgacatatgttgcttttgagaaattgcgaagggattatccctccaaaatcttgatgaacctgagcacagccctgctgttcctgaatctcctcttcctcctagatggctggatcacctccttcaatgtggatggactttgcattgctgttgcagtcctgttgcatttcttccttctggcaacctttacctggatggggctagaagcaattcacatgtacattgctctagttaaagtatttaacacttacattcgccgatacattctaaaattctgcatcattggctggggtttgcctgccttagtggtgtcagttgttctagcgagcagaaacaacaatgaagtctatggaaaagaaagttatgggaaagaaaaaggtgatgaattgtaagtaataaaaccttttgtgatgagtagatacccnttgtttcctgaagtttagcattaatttccatgccaataacaaggctttcattttaaaaggttgatgtttattcacatgactgccaaaatctctgctacaccacagattaattcagttgaatgccctgaaatgtttgagacactttttcatattaacattgtactctgtcatatggaggaattgagaaaatgcctaagacagttttttagcctcagaagacccattctatttcagaagatttcataacactctcacctcctcaaacccacccacgtcttcaagagagttaaatagcagtatcagacagagagtgaatgattcattgccaatgggagtgttaggtagaaatttagagaatggagaaatcagcatgttcttaaacaatttcaaaagttctcttcagattgtgagatcattgagattaagggttttatattgttcagtttgggcagttaccgatctcctattttattagtccaccatgggtactcaataaatatatgttgattg

SEQ ID NO: 46 - DNA, 3123 bp, Homo sapiens
  misc_feature: Incyte ID No: 903508.12
  unsure 29, 208, 234, 241, 244, 257, 279, 297, 307-308, 310, 327, 330, 332: a, t, c, g, or other
agctctaccacctatttcaaaaggaatangccacacagataatgtctcctatgagcattccttcaacaaaagggggatcactcagacagtgcttccatggacaagtccttgtcaaaactggcccatgctgatggagatcaaacatcaatcatccctgtccatcaggtcattgataaggtcaaggggtattgcaatgctcattcagacnacttctataaaaatattatcatgtcngacaccntcngccacagcacaangttttaatgtctttaagaaaangaaatcaatctgcagaantgtgaagatnngnaagcagtgtaaactgcnacnantgatgtaaatgtgctattacctaggtaactgcatatatataaggaatgtattttgttaagaaggcttttgtgaaattcagaatttttctttttaatatatttcttccatggaagagttgtcatcactaaaacttcagtactgagagtaacatgactcagtagccacagaagctatgatttgtaaaatatataattgaatcagagtaatcataatgcaggggagacattcaaattagagacaagggagaagcaatgctgaggaagaccctagatagagctcattttactccacctaatcgttatatctggatatacccattttctgcatcttctttctcaacaataaaaaatgtaactattttgaatgcccacaaatcccattccagtgttactttctgtgaatgcagtaccatattctcattttcaatgacatttcaaccacaggcagaaaagactgtttactccttgacccaaagattaaaaaggattttttattattttaaatattacaccttcagaaccataacatgcttaagaaaactttcccaaaatgttgacctagttaaatgaggctatataaatttctaatattttacttattctattcaaggcatagggccaaagcattaagtataatttaatcccatacattcgagttaagtttagtgttgatgttccatcattctggacctcccaggagttgtttaagaatgaatctcttacacctctacttttgcccctctactgtatattaagcccataggcttgtgggaggaaggagaatttccattaggcaagctgtatgcagtggaattttccttttaggagacacacaattaagactctctggttctgtccttgctttggagactttaagacatttcctaaagcacaaataaaagcctcgtatttccccattgagagttttgttccaaggaatatgaagtgagacatatgggtgagtcataataatcaaaataatttatgaagagctgggtctgcaatagctagtctaaaaactacttgtgtgtcagtcctctggttatagtatataagagcctgaggaggtctggcaagatagatggtgtattatttatggatcaggctgctgcatacaaaccttgcatactattatgcagcttacctaactctcagactattctgagtaatgcttgcttgctaatgaatgtataggagaccacattgtaattgttcttagatgatggagtccatgcagtttcttagaaatcggtctcagtgcatgctgtgctttttcacatttgctctgggttatctgggaagtatcaggttctgggaggcaacagcattaagtgataagaaaaggagacattctggcaaagccaatctgcttaaaggcaaagtccagaacctggaacctagaggcctttctctctgcacgaaaaacaggtagtttgcagtctgagatatgggagagcttttaggctacacagcaacccaagggacctctcaccttttgctgagcttcaatcaggaagctatttgcctggctccagcagatgatgagataatgaggtagtgggttttttattactgttccattttgcaacatcctgcaacaccatcctgggagacaagagcattacccagcttggctttcacgggggagggttgtattcagtaaaaaagaatagtaaatataaggtcactgagattctaagtaagatagtaaatctaaggtcactgagccaaatccttttcaataggcatatattaacaggctgcttattttggcggaggttacatatggatgaaaatgaatcttagtcactgaatattcatatacatttcccccaaaaccttagacattcatagtagattttaattagttagctttctaactagtcagatttctgcccaaagtgcttagtcaatagtaattaagatatagcttcaaaaatggctttgcttttgatttctactcatattcgtatggctccagaaaaatatttttttcatatttgacaatgtcagctccactttagaaattttcaataaccagatgagaaaaaaattaagaaattgctcaagggaaacatttgtaaatggatttgaaagattgagccaaattctgttgtcagttctaagcatgcagttctcacctccatttagtcccccatcagaacagaggtcaggaatttagctggggagcctaaatttagttcagcttacctttgagaatagcatcaattcagactctcttttcattatgttttcttttctttttccctctttttaaactacattgtgttagagtcatagtctaggatcctgagagattttccattcttgtcaccattcacttgcattgtaaagattttctttgtctgttgttggcatagattcttttgtacatatttatttatttgtgtttatatatgtcaattggtttcctttcttagcttgatattgcctagctttgttgttttaattaactttctattagagagactgtatatattttttctaaatactttgtgaaatcatttttggtagcaatatctttgaatatgatgaataaaagtgactgtgagtgcaaatagaattagcagtaagaagctactctagctaatttgccattttacttaaatggaaaatgtttttcaaataaatacttatgttgttcatgttccaagttattcaattcctttatgagtgaatgtttttacttttgactcctaaataggaaaagattatttgacagctggaaaataacctgccaccaattaagcgagtgacatagggctacttt

SEQ ID NO: 47 - DNA, 2974 bp, Homo sapiens
  misc_feature: Incyte ID No: 334387.1
gccattttaattcatatctgagtgggcggtggcgattggtgttggcggtctggctcagctgggcagggggtaactttactgatttgggggtggtttttagtttaatttttcttttctagcttcccatcgacggtcagtgcgcacgttgtaatcagctgaggccatgtcaggagacggagccacggagcaggcagctgagtatgtcccagagaaggtgaagaaagcggaaaagaaattagaagagaatccatatgaccttgatgcttggagcattctcattcgagaggcacagaatcaacctatagacaaagcacggaagacttatgaacgccttgttgcccagttccccagttctggcagattctggaaactgtacattgaagcagagattaaagctaaaaattatgacaaggttgaaaagctatttcagagatgccttatgaaggttttgcacattgatttatggaagtgttatctttcatatgtccgagaaaccaagggtaaactaccaagttacaaagaaaaaatggctcaagcatatgactttgcactggataaaattggaatggaaattatgtcctatcagatttgggtggattacatcaatttcctaaaaggcgtggaagctgtaggatcttatgcagaaaatcaaagaataacagctgtccgaagagtttatcaacgaggttgtgttaatccgatgatcaacattgaacagctctggggagactataacaagtatgaagagggtatcaatattcatttagctaaaaaaatgattgaagatcggagtagagattatatgaatgctagacgtgtagcaaaggaatatgagacagtaatgaaaggcttggaccgtaatgctccctcggtgcctcctcagaatactcctcaagaagctcaacaagtagatatgtggaagaaatatatacagtgggaaaagagcaaccctcttcgtacagaggatcagacccttataacaaaaagagttatgtttgcttatgaacagtgcctgcttgtgctgggccatcaccctgatatttggtatgaagctgcccagtatcttgagcagtcaagtaaactgctcgcagaaaagggagatatgaataatgccaaattatttagtgatgaagctgctaatatatatgaaagagccataagcactttattgaagaagaatatgcttctttattttgcatatgcagattatgaagagagtcgcatgaagtatgaaaaggttcacagtatatataacagacttctggcaattgaggatattgaccctaccttggtatatatccaatatatgaaatttgcacggagagcagaaggcatcaaatctggaagaatgatatttaaaaaagcaagagaagataccagaacccgccaccatgtctatgttactgcagcactcatggaatattactgtagtaaggacaaatctgttgcctttaagatttttgagctggggctaaaaaaatatggagacattccagagtatgtcctggcctatattgactatctttctcacctcaatgaggacaataatacccgagttttgtttgaacgagttttaacatctggaagccttcctcctgagaagtctggagaaatctgggcccgatttctagcatttgaaagtaatattggtgatctagctagtatactcaaagtggagaaaagacggtttacagcattcaaagaagagtatgaagggaaagaaacggctttactagtagatagatacaagttcatggatttatatccttgctctgcaagtgaattaaaagcacttggttataaggatgtctcccgtgctaagctagcagctataattccggacccagttgtagctccttctatagtgcctgttctgaaagatgaagtggatagaaaaccagaataccctaaaccagacactcagcagatgattccatttcagccacgacatttagcacctccaggtttacaccctgtacctggtggagtgttcccagtccctcctgcagctgttgttttaatgaaacttctccctcctcctatctgtttccagggtccttttgtacaagtggatgaactgatggaaattttccgaagatgcaagataccaaatactgttgaggaagctgtgaggatcattactggtggggccccagagctagctgtagaaggcaacggccccgtggaaagtaatgcagtactcaccaaggccgtcaaaaggcccaacgaggattcagatgaagatgaagaaaagggagccgttgtcccccctgttcatgacatttacagagcacggcagcagaagcggattcggtagggttttaaacgcctctacagaaaactcctgtccaggattccttttgcctcaagtggtatgtttaaaagagacaacgctttgttacaaggttcttggaaacaaagttgtattgtcattggtgcctctatcacatggttcttgagaaaaaacaaaccaacctgtgtgaattttagaatacggaacagacctatgctctaagcaaaattaggttttcaaaaatgtgagaacagtacaaagtggcagaaccacattttgttccctcttcaagggtgtcttgtatgtgccgcttgaagatttgtgagtttttcaacagttttattttaaaaactggatggcttatgattgtaaagcattttatcacattttctgaaaacaattgttcttggtttgcttatgtagagtcctgccttattgtttgtttttatttatggcagaatgtatgaaatccgttttgtagtttcaaattttaaaagtcctttaaaaaataaaaggattcagaaacatcatgcttcctctgcttctttcagattttatttacaataactacttatgttattttatccaataccatttaaaaataaatgtcaggacaaggaaaagtcatcttgtatttactaaatgtattaatcacatactccttcctggtcttttttggtg

SEQ ID NO: 48 - DNA, 1550 bp, Homo sapiens
  misc_feature: Incyte ID No: 290403.5
gtggcggcgcactacggcaagagagtgagaaggaagggaagccggaaggggcgcgagtgaagcaaagcgaggacagacagctcccagagggcgaggggtgcgtgtgcgtccgcttctcacctcaggtctcccttcggccccgctgccctccctcgcggctgggtgacagctgggtccggtccgtcgcgggctgcctggggtgcgaggatcgcgcaccccgtcttcgcgcgctgtgcctgccgccccgccccctcgtcccgcccgtcccgtcgcgtcgcgtcccgtcccctcgggtgctgccagccgggtgctgatgcgagtcggtggcagcgaggacattttctgactccctggcccctgacacggctgcactttccatcccgtcgcggggccggccgctactccggccccaggatgcagaatgtgattaatactgtgaagggaaaggcactggaagtggctgagtacctgaccccggtcctcaaggaatcaaagtttaaggaaacaggtgtaattaccccagaagagtttgtggcagctggagatcacctagtccaccactgtccaacatggcaatgggctacaggggaagaattgaaagtgaaggcatacctaccaacaggcaaacaatttttggtaaccaaaaatgtgccgtgctataagcggtgcaaacagatggaatattcagatgaattggaagctatcattgaagaagatgatggtgatggcggatgggtagatacatatcacaacacaggtattacaggaataacggaagccgttaaagagatcacactggaaaataaggacaatataaggcttcaagattgctcagcactatgtgaagaggaagaagatgaagatgaaggagaagctgcagatatggaagaatatgaagagagtggattgttggaaacagatgaggctaccctagatacaaggaaaatagtagaagcttgtaaagccaaaactgatgctggcggtgaagatgctattttgcaaaccagaacttatgacctttacatcacttatgataaatattaccagactccacgattatggttgtttggctatgatgagcaacggcagcctttaacagttgagcacatgtatgaagacatcagtcaggatcatgtgaagaaaacagtgaccattgaaaatcaccctcatctgccaccacctcccatgtgttcagttcacccatgcaggcatgctgaggtgatgaagaaaatcattgagactgttgcagaaggagggggagaacttggagttcatatgtatcttcttattttcttgaaatttgtacaagctgtcattccaacaatagaatatgactacacaagacacttcacaatgtaatgaagagagcataaaatctatcctaattattggttctgatttttaaagaattaacccatagatgtgaccattgaccatattcatcaatatatacagtttctctaataagggacttatatgtttatgcattaaataaaaatatgttccactaccagccttacttgtttaataaaaatcagtgcaaagagaaa

SEQ ID NO: 49 - DNA, 2995 bp, Homo sapiens
  misc_feature: Incyte ID No: 391406.5
tcccaggagcctgagagggcaaatggccatctgaggagataaccacatcactaacaaagtgggatgaccccgcagagcacgctgtggaatccatagttggtctcatccctggtcagtttccacatgatgatggtcttatctcgagaggcggagaggatcatgtccgggaactgcggggtagtagcgatctgggttacccagccgttgtggcccttgagggtgccacgaagggtcatctgctcagtcatggcggcggcgagagcgtgtgtcgctgcagcggacgaggatggcactggatggcttagagaaactagcaccacaacctctcctgccgccgccttgcagtgaaagagcagatgacccttcgtggcaccctcaagggccacaacggctgggtaacccagatcgctactaccccgcagttcccggacatgatcctctccgcctctcgagataagaccatcatcatgtggaaactgaccagggatgagaccaactatggaattccacagcgtgctctgcggggtcactcccactttgttagtgatgtggttatctcctcagatggccagtttgccctctcaggctcctgggatggaaccctgcgcctctgggatctcacaacgcaagtagctgctcacttagctctggggccttgggaagaatctgggcagaagtgaggtggatgcaattggctggtttcccaggggagatccagtccatttgggaactggaaagcagagcacacctacagaagatgtttggcctccctcactttaaataagttactcagcattgctgaggagtgtggctgaacatttttgccaggtgcaaaagttctgagtgggcagcagtttgaacatgttttaccttgaaagctcaggtaattggcaggtggaattagagggtcctggtgatgacagatggcattgtcagccaatccccaagtgggagtgaggacatgtcctgcaattctgaagggattctctgtcacttggctcttctctttcatatactcagtcacttgactctgtgatcagagccaaatccagggttgtatgagtgatgcaatgagacagagacaaagcccaggaaatgagtctgaccgttgaatgagagtgtttgctaagtctgagaatgacaaactcctccctctcaggggcaccaccacgaggcgatttgtgggccataccaaggatgtgctgagtgtggccttctcctctgacaaccggcagattgtctctggatctcgagataaaaccatcaagctatggaataccctgggtgtgtgcaaatacactgtccaggatgagagccactcagagtgggtgtcttgtgtccgcttctcgccctacagcagcaaccctatcatcgtctcctgtggctgggaccagctggtcaaggtatggaacctggctaactgcaagctgaagacccaccacattggccacacaggctatctgaacccggtgactgtctctccagatggatccctctgtgcttctggaggcaaggatggccaggccatgttatgggatctcaacgaaggccaacacctttacacgctagatggtggggacatcatcaacgccctgtgcttcagccctaaccgctactggctgtgtgctgccacaggccccagcatcaagatctgggatttagagggaaagatcattgtagatgaactgaagcaagaagttatcagtaccagcagcaaggcagaaccaccccagtgcacctccctggcctggtctgctgatggccagactctgtttgctggctacacggacaacctggtgcgagtgtggcaggtgaccattggcacacgctagaagtttatggcagagctttacaaataaaaaaaaaactggcttttctctctctctttcactgcaaggcggcggcaggagaggttgtggtgctagtttctctaagccatccagtgccatcctcgtcgctgcagcgacacacgctctgcgccgccgccatgactgagcagatgacccttcgtggcaccctcaagggccacaacggctgggtaacccagatcgctactaccccgcagttcccggacatgatcctctccgcctctcgagataagaccatcatcatgtggaaactgaccagggatgagaccaactatggaattccacagcgtgctctgcggggtcactcccactttgttagtgatgtggttatctcctcagatggccagtttgccctctcaggctcctgggatggaaccctgcgcctctgggatctcacaacgggcaccaccacgaggcgatttgtgggccataccaaggatgtgctgagtgtggccttctcctctgacaaccggcagattgtctctggatctcgagataaaaccatcaagctatggaataccctgggtgtgtgcaaatacactgtccaggatgagagccactcagagtgggtgtcttgtgtccgcttctcgcccaacagcagcaaccctatcatcgtctcctgtggctgggacaagctggtcaaggtatggaacctggctaactgcaagctgaagaccaaccacattggccacacaggctatctgaacacggtgactgtctctccagatggatccctctgtgcttctggaggcaaggatggccaggccatgttatgggatctcaacgaaggcaaacacctttacacgctagatggtggggacatcatcaacgccctgtgcttcagccctaaccgctactggctgtgtgctgccacaggccccagcatcaagatctgggatttagagggaaagatcattgtagatgaactgaagcaagaagttatcagtaccagcagcaaggcagaaccaccccagtgcacctccctggcctggtctgctgatggccagactctgtttgctggctacacggacaacctggtgcgagtgtggcaggtgaccattggcacacgctagaagtttatggcagagctttacaaataaaaaaaaaactggcttttctgaaaaaaa

SEQ ID NO: 50 - DNA, 972 bp, Homo sapiens
  misc_feature: Incyte ID No: 391406.24
  unsure 182: a, t, c, g, or other
agaggttgtggtgctagtttctctaagccatccagtgccatcctcgtcgctgcagcgacaccacgctctgcgccgccgccatgactgagcagatgacccttcgtggcaccctcaagggccacaacggctgggtaacccagatcgctactaccccgcagttcccggacatgatcctctccgcntctcgagataagaccatcatcatgtggaaactgaccagggatgagaccaactatggaattccacagcgtgctctgcggggtcactcccactttgttagtgatgtggttatctcctcagatggccagtttgccctctcaggctcctggggatggaaccctgcgcctctgggatctcacaacgggcaccaccacgaggcgatttgtgggccataccaaggatgtgctgagtgtggccttctcctctgacaaccggcagattgtctctggatctcgagataaaaccatcaagctatggaataccctgggtgtgtgcaaatacactgtccaggatgagagccactcagagtgggtgtcttgtgtccgcttctcgcccaacagcagcaaccctatcatcgtctcctgtggctgggacaagctggtcaaggatggccaggccatgttatgggatctcaacgaaggcaaacacctttacacgctagatggtggggacatcatcaacgccctgtgcttcagccctaaccgctactggctgtgtgctgccacaggccccagcatcaagatctgggatttagagggaaagatcattgtagatgaactgaagcaagaagttatcagtaccagcagcaaggcagaaccaccccagtgcacctccctggcctggtctgctgatggccagactctgtttgctggctacacggacaacctggtgcgagtgtggcaggtgaccattggcacacgctagaagtttatggcagagctttacaaataaaaaaaaaaactggcttttctg

SEQ ID NO: 51 - DNA, 2825 bp, Homo sapiens
  misc_feature: Incyte ID No: 474588.21
  unsure 1733, 2736, 2816: a, t, c, g, or other
aataattagcttgctttcgaatatctggacttagacagtcttagcctttggcctctcaagggctctaaatctctatgcacaattttgtgttttcattttggtgtggaaaatctttgtaaattttatcctattgtcagagtagtcatagaaccataaaaggataaagaagcctgatctagatctttgctgctgcttcagagaatcttttcagagagaaataaatgagttgaatatttttcaagactaacattttctgaaactttaagaagaaaaaattttctaacattgtgaacagattaagtagctattttattaaatgctttgattttaattgaggtagtttttttgaaaacacgggaattttagtttggaattaggcaaagattgtttaacagttggtgagtttaagttaagtgaccttcagattttagcaatttcatgatttacaaatcgtgggttatatttttttctcttaaatatatttctgtgtcatatttttagtctgtagattttcttatggtcccatgattattggtgtatactttttttttcttggtaagacctttaagttttatgattttcaattgagataatgtataatgtttgagttttaggctatataaggaattagctttcctgcatttaaaggaatcatttggcagtcagtagcatattttcctgattttttgttgttgttaaaggagataagttgataactgtatgttgaagggttctcatgatattctctaaaaagtgcaaatatcagtgcttgatttatagatgtgtaataaacagtggtctgtaaaagcatgtagtataaaaaatatggtattttcccttatatacagcctataaactcttcctattccttgagtttagggtagactaacaaattacagcgtagaagagagtcagctaccagattaaatgcatgcgtaccatacagataatttattaagtatttttgcatattgaacattgacttacattaattttcccttttcaccaccacgtctttgtcattttgaccctgaacacttaataaatcactcagattgatctaaaatatgcttatgtatactttaatagaaaattacattgcatggctttctgacttgggtttttgttataaaagtgcctgttttgttcatgtgtcctgagagagcaagcattgtgacatacctgactaacttaaaagcagattgcctgtgaagcacaatttgagtccaattttttgaggtatggagttttagctatcatggctgggtttttactcaatctcaaataatagggctctggttattttgcagagtgtctctgaagaatggacagaattgccctggctaactacaagctacggttcacagtggataaatgttggcgtgcttttttactttctgactttttaaaattttgcttttatatcttgtagttccaatcaattttatatgaatgctattataaaattcagtgtaaaatcttttcttgtctagcttaaaacttgtgtgtgtctagtatttttcttcaatgatttaacatttctgaaaatgtcaagttctcaaaatttagacaaaaaggggggtataaattgatctgaaaaaattaaatagtttaattagtttagggaatatacaactttttcattcttttggtttccagttttctatttttttttaatgattaggtagaatatagtgtcaaataagttataaattgcatggttaaagaaagcnattcatctaatgtcctgtgaactttataagtggttaagtagttcatgtgagtagctgctttcaccatgcttaatatttaaaagtttaaaaagttttttgaagagagaggcaatttctgtacaatataaatatacatatatacttaagttattgatttgcatgtctataaaattaagcctcatttcctaatacatgataaattttgtagaataaaaggtgaatttgcattaaaggttcactttaatgaaggtgaaacatgagaatgagttgtgtgtgaaattcttatttgatatccagaggatagtttgcaaacctaaacttctgattgtttctgatttcagagatgcccgagtggtaaaagacatggcaacaggaaagtctaagggatatggctttgtctcctttttcaacaaatgggatgctgaaaacgccattcaacagatgggtggccagtggcttggtggaagacaaatcagaactaactgggcaacccgaaagcctcccgctccaaagagtacatatgagtgtaggtgtattggagaagaaaaggaaatgtggaattttggagaaaaatacgctagattttaaatgttagagctgttcccggagacttattgcagaaatagatgagaagcaaatcaagactactattcaaaaatcaaataccaaacagctatcatatgatgaggttgtaaatcagtctagtccaagcaactgtactgtatactgtggaggtgttacttctgggctaacagaacaactaatgcgtcagactttttcaccatttggacaaataatggaaattcgagtctttccagataaaggatattcatttgttcggttcaattcccatgaaagtgcagcacatgcaattgtttctgttaatggtactaccattgaaggtcatgttgtgaaatgctattggggcaaagaaactcttgatatgataaatcccgtgcaacagcagaatcaaattggatatccccaaccttatggcccagtngggccagtggtatggaaatgcacaacaaattggccagtatatgcctaatggttggcaagttcctgcatatggaatgtatngccaggcat

SEQ ID NO: 52 - DNA, 4404 bp, Homo sapiens
  misc_feature: Incyte ID No: 124541.1
  unsure 2834, 2900, 2903, 2938: a, t, c, g, or other
atgctgaaggtggtgggggtcttttcagtgtttttctattttctttcctacgaaacagagcccctccagggcaggcccaggcccctcccagcctgtccgggccacagatacctgcagctgtggccagtttccaggaggtctttgagcacacctgcttcagcagccctgagcacacctgcatcttcagtctcagtttgaggggctggaatggggagggaagatgatttggaaggatttggggagagaagagatatacaagccggggctgtctgggtttggcccaggtgtgtgcccctcttcaccactccactttgtagattccctgtggcaggggatgcggttgcaggccccacggaagtgcggagggtggaggtgacgctggctctgagttgggaaacaggcacgtttgtgggttcagagtcctgggagagtctcgccaaggaaacaggaccaggcctggggctcagagaggcaagaggaggggcagcctgggcagaggtgggctgggaagggggcagggaagaggctgcgggcagctgggggtggccctgtgctggttggaagctagcggtgagcgtcagatgggggctgaagcttgtcttagagaggggcaggagcactggtcctttgtttccagcttctgaagaggtaagaactccccaggagcaggggcagggggagggggaggaccatccaaggaaacactgcctcagctggcagggcagaggtacagagtcaggaccagaggcttggcaatagggagacggtagggaagctggtgccaccggcagaacaggagcaagtagggggtatacttttaagagatgcctgattaaacctgggtttgagttctttttctgtcccttaccagctagcgtagtcttggttacttaagcactccgggcctcagttttgtcatctatgaaatgggaacagtagtgcagaccttgacacacaggagcttctcaaacagaaggaatgagaggtgcagagcagcagcaccaggagctccgcttcggggtgtgaatggccatgggcggacatgcaggtgcaggacaggcgaagtgtgggacagatgaagtttctagcctggactgtgaggggcctggcagcctcccctctcaggagcccctctacctgccctggtccttccagctgacctgtaggcaagctggggcatgcagggaaggccctctgtggggcccgaggatttgctggagagcactgtgggtacacaaggttggtgggggtacagggcgtgccagggcacctgcaaggagttgaggagcgtgccttaggagggaaatcagtatttgggctgactgaggggaggagctggagagcagaaggttccaggcccagcaaaagctgctgggatcaaggtgacagaatgagaaccaggtgggaacaggtagtacccagcccccataaacaattcctgctgggtcctcgggcctcccttggaatacagggggtgggctggttctgccacgcattgcagctggaggagacttctcaggtgagacgaggacctttgctgcactctcacagacatgtgacaggcctttctgtgttgccttcccaggatgacccctccggcgaaggtgtcctgccctcggcccgcggcccagccaccttcctccccttcctcactgtggacctgcccgtctacgtcctccaggaggtgctcccctcatctggaggccctgctggaccggaggccacccagttcccaggaagcactatcaacctgcaggatctgcagtgacggcagcctcggcctgggcaggcccaaggccacggtctaggacacaccttccctgagactcatgacatgagcctggggagacctcatttggtttccgttcagaagaccagcgtagcccttttgagacttttgggtacatttatcaaaaatgttttccttttgttttaccaggaatgagttcgggctatactctttgaaactgcctttgtgagcaaagtgctttggcaaggcaaggatctccctgcagtgagggggaactgaatctgtgttacccagaaacctcctggttagcatttgcacttcaaagaaaaagagccctgaggcacccagaaaagacagcaggctgtgcctaagtacagaggacccaaggtttgtgcacccagttggcttgcctgctgagtgtgaagctctccgggaccccagggcactgcggaagacaggaagggatctggagtgaggtgagcaggtcagggagacagcatatgcagggcaagtcagctctcaccccatgggctgctcagaaccttcctgtcaaacagcctcgtaaaaacagcctgccttgggcagcagggtcacccaattgaatacttttattaggaataacttatatgatagtcattgtacagttgtttttttgaagccgttcatagctggatcccgcacatccaggcagggatgtgtgggcagagcagtgacagtgcctaaactccttggcactcgccagtcactgttctaagttttgatcacatatttcctatgaaatcctctccaaaaccttccgaggttgggactagcattcccattttacaggtagataatgctgaggcccagagcttgagttccttgtccagatccctggagcagagtgggtggcgggtcagggtgagcctagccggggtctctgcagtgcacgctctaggctacctttgggcccttttgaagcagctcttgggtttgttatgggtgttaagattttttcttttttctttgtgctttacttcatttcttaagaagcacatatttgtaaaacccatggagtagtgacttggaaaggagctggacagangcagcagtccacccacaggtggggtatggagaccgcccgcttccttcccaattccatgatgctgtngcnctgggctgttggctgtcctcagttgcgcttggggntcctgccagccagcagctgctggagttagaggattctgctctccaagaatttgcagcttgtgtctgattaccgtaccgtctggcaaaaaaaatacgtatgatgtttttacatttttaaaatcaaaatcctgatgtttttttgttcgtatggttgtttgtttcaacctcttaactcttgattttttctgttaagtgattttacgtctcttagctgtgcagaatgacaattaatgggaaggctgtcttccccatagtgagaccttggtaagggcagacctgactggtagattgtagattgggtgtgctcgtttttatatttcattttaggagcctcacagtctactcagagaaaaataaaagaaggaaacatgagtcctccccatttccatgcaagccagaacagttggttgtgtgggagcctcgtggtgcccagcggaggacggccaggaccagctccagcagctggggtgcagtgcggggcgcagggcgtccaggtccagctggtgcaggatgacccctccggcgaaggtgtcctgccctgcggcccgcggcccagccaccttcctccccttcctcactgtggacctgcccgtctacgtcctccaggaggtgctcccctcatctggaggccctgctggaccggaggccacccagttcccaggaagcactatcaacctgcaggatctgcagtgacggcagcctcggcctgggcaggcccaaggccacggtctaggacacaccttccctgagactcatgacatgagcctggggagacctcatttggtttccgttcagaagaccagcgtagcccttttgagacttttgggtacatttatcaaaaatgttttccttttgttttaccaggaatgagttcgggctatactctttgaaactgcctttgtgagcaaagtgctttggcaaggcaagggtctccctcagcagggctaggtgcactacagcctctttccccgtgtcccgttggatctgagctgtgtagcacttgttgcattacaaagaaaaagacttctgcaggaaatagggtagagaacaggctgtctagtcagatgcagcttgatctgtggcaaaaccaagtgtggtctttcagcttcagtgtgttagcatcccagcacctgggatggggtttgtgggcaagttgattttgccacactgtagggcccaggtggtcccattgccaccgtgaagccaaattctagcccaagtctggtagagcagtcgggcagctagttttcgggggaggatgatgtggtgggacagaggacctcagtggcctattacggagccctcttcccagactaaattcatagccgagagctcggggggatggtagagttaaaatttaaaataattttctaaattctgtatttggatattagtgtttaagtggtaatttggcaacagtttataaagtgatgttctgaataccataaattatgtgtaggactgtg

SEQ ID NO: 53 - DNA, 1924 bp, Homo sapiens
  misc_feature: Incyte ID No: 246862.9
  unsure 1333, 1336: a, t, c, g, or other
ggccggctgtcttgaccttctttgcggctcggccattttgtcccagtcagtccggaggctgcgggctgcagaagtaccgcctgcggagtaactgcaaagatgctgtccgtggcgccgttgctgcggccgtggtccgcgcccttcctcgggcgggccggactggtctccagaaatgctttgggttcatctttcattgctgcaaggaacttccatgcctctaacactcatcttcaaaagactgggactgctgagatgtcctctattcttgaagagcgtattcttggagctgatacctctgttgatcttgaagaaactgggcgtgtcttaagtattggtgatggtattgcccgcgtacatgggctgaggaatgttcaagcagaagaaatggtagagttttcttcaggcttaaagggtatgtccttgaacttggaacctgacaatgttggtgttgtcgtgtttggaaatgataaactaattaaggaaggagatatagtgaagaggacaggagccattgtggacgttccagttggtgaggagctgttgggtcgtgtagttgatgcccttggtaatgctattgatggaaagggtccaattggttccaagacgcgtaggcgagttggtctgaaagcccccggtatcattcctcgaatttcagtgcgggaaccaatgcagactggcattaaggctgtggatagcttggtgccaattggtcgtggtcagcgtgaactgattattggtgacccgacagactgggaaaacctcaattgctattgacacaatcattaaccagaaacgtttcaatgatggatctgatgaaaagaagaagctgtactgtatttatgttgctattggtcaaaagagatccactgttgcccagttggtgaagagacttacagatgcagatgccatgaagtacaccattgtggtgtcggctacggcctcggatgctgccccacttcagtacctggctccttactctggctgttccatgggagagtattttagagacaatggcaaacatgctttgatcatctatgacgacttatccaaacaggctgttgcttaccgtcagatgtctctgttgctccgccgaccccctggtcgtgaggcctatcctggtgatgtgttctacctacactcccggttgctggagagagcagccaaaatgaacgatgcttttggtggtggctccttgactgctttgccagtcatagaaacacaggctggtgatgtgtctgcttacattccaacaaatgtcatttccatcactgacggacagatcttcttggaaacagaattgttctacaaaggtatccgccctgcaattaacgtnggnctgtctgtatctcgtgcggatccgctgcccaaaccagggctatgaagcaggtagcaggtaccatgaagctggaattggctcagtatcgtgaggttgctggcttttgcccagttcggttctgacctcgatgctgccactcaacaacttttgagtcgtggcgtgcgtctaactgagttgctgaagcaaggacagtattcctcccatggctatggaagaacaaagtggctgttatctatgcgggtgtaaggggatatcttgataaacctggagccccagcaagattaacaaagtttggagaatgctttccttgtcctcatgtccgtcagcccagcacccaagccttgtttgggcactatcagggctgatggaaagatctcagaacaatcagatgcaaagctgaaagagattgtaacaaatttcttggctggatttgaagcttaaactcctgtggattcacatcaaataccagttcagttttgtcattgttctagtaaattagttccatttgtaaaagggttactctcatactccttatgtacagaaatcacatgaaaaataaaggttccataatgcaaaaaaaaaaaaaaa

SEQ ID NO: 54 - DNA, 2002 bp, Homo sapiens
  misc_feature: Incyte ID No: 246862.17
  unsure 533, 535-536, 548: a, t, c, g, or other
tgggagttgtggttttacctgagactcctggccgttgagcccctgtgcaaggctggtcgaaggctctggcattgcaagcctcgcttcgttgccacttcccagctcttcccgccttccgcggtataatcaacactacgagagatagagccgcctagaaccaggtctccagaaatgctttgggttcatctttcattgctgcaaggaacttccatgcctctaacactcatcttcaaaagactgggactgctgagatgtcctctattcttgaagagcgtattcttggagctgatacctctgttgatcttgaagaaactgggcgtgtcttaagtattggtgatggtattgcccgcgtacatgggctgaggaatgttcaagcagaagaaatggtagagttttcttcaggcttaaagggtatgtccttgaacttggaacctgacaatgttggtgttgtcgtgtttggaaatgataaactaattaaggaaggagatatagtgaagatgacaggagccattgtggacgttccagttggtgangnnctgttgggtcgngtagttgatgcccttggtaatgctattgatggaaaggtaggtttaatgttcgttagatatagttgcagcttctaacaaacatcaaaactgattatgcttagggtttttctttttattttttaacagggtccaattggttccaagacgcgtaggcgagttggtctgaaagcccccggtatcattcctcgaatttcagtgcgggaaccaatgcagactggcattaaggctgtggatagcttggtgccaattggtcgtggtcagcgtgaactgattattggtgaccgacagactgggaaaacctcaattgctattgacacaatcattaaccagaaacgtttcaatgatggatctgatgaaaagaagaagctgtactgtatttatgttgctattggtcaaaagagatccactgttgcccagttggtgaagagacttacagatgcagatgccatgaagtacaccattgtggtgtcggctacggcctcggatgctgccccacttcagtacctggctccttactctggctgttccatgggagagtattttagagacaatggcaaacatgctttgatcatctatgacgacttatccaaacaggctgttgcttaccgtcagatgtctctgttgctccgccgaccccctggtcgtgaggcctatcctggtgatgtgttctacctacactcccggttgctggagagagcagccaaaatgaacgatgcttttggtggtggctccttgactgctttgccagtcatagaaacacaggctggtgatgtgtctgcttacattccaacaaatgtcatttccatcactgacggacagatcttcttggaaacagaattgttctacaaaggtatccgccctgcaattaacgttggtctgtctgtatctcgtgtcggatccgctgcccaaaccagggctatgaagcaggtagcaggtaccatgaagctggaattggctcagtatcgtgaggttgctgcttttgcccagttcggttctgacctcgatgctgccactcaacaacttttgagtcgtggcgtgcgtctaactgagttgctgaagcaaggacagtattctcccatggctattgaagaacaagtggctgttatctatgcgggtgtaaggggatatcttgataaactggagcccagcaagattacaaagtttgagaatgctttcttgtctcatgtcgtcagccagcaccaagccttgttgggcactatcagggctgatggaaagatctcagaacaatcagatgcaaagctgaaagagattgtaacaaatttcttggctggatttgaagcttaaactcctgtggattcacatcaaataccagttcagttttgtcattgttctagtaaattagttccatttgtaaaagggttactctcatactccttatgtacagaaatcacatgaaaaataaaggttccataatgcgtaaaaaaaaaaaaggg

SEQ ID NO: 55 - DNA, 357 bp, Homo sapiens
  misc_feature: Incyte ID No: 013040.1
  unsure 341: a, t, c, g, or other
ccttggctataaatctccacttattcctggtgtatttggaatagttacgactgagttgccctcacccccttcacttccctcttttttttttttttcacaatggaggacacaaaacgttgttatttcaagtctttgtggccaacagattggtggtttatgggccagcatccctttttatgcgtaaaatatttaaaacgcagcctgcaatggttggtaaagtggtgaaacgtttagtgtgtgaggtcggatcctagtctggccgctggccctggcgatcctctgaggcggcctgagtttggggcgcctcgtgtcaccgcgcgcccctcctccgggcctgagtnacggtgccgccggagt

SEQ ID NO: 56 - DNA, 3486 bp, Homo sapiens
  misc_feature: Incyte ID No: 236480.3
ggaagccaggccggcagccgcgcgctccccagccggccaccaatcccgacctccccggctcctccggacctactcggcaggcggcggcggggcctgcctgtgcgctctgggccggccgagtctaccctcgatggcgtttatccggaagaagcagcaggagcagcagctgcagctctactccaaggagagattttccttgctgctgcttaacttggaggagtactactttgaacagcatagagccaatcacattttgcacaagggcagtcaccatgaaaggaaaatcagaggctccttaaaaatatgttcaaaatcggtgatttttgaaccagattcaatatcccagcccatcatcaagattcctttgagagactgtataaaaataggaaagcatggagaaaatggagccaatagacacttcacaaaggcaaaatctgggggtatttcactcattttcagtcaggtatatttcattaaagaacataatgttgttgcaccatataaaatagaaaggggcaaaatggaatatgtttttgaattggatgttcccgggaaagtggaagatgttgtggagacgttgcttcagcttcacagagcatcctgccttgacaaattgggtgaccaaaccgccatgataacagctattttgcagtctcgtttagctagaacatcatttgacaaaaacaggttccaaaacatttctgaaaagctgcacatggaatgcaaagcagaaatggtgacgcctctggtgactaatcctggacacgtgtgcatcacggacacaaacctgtattttcagcccctcaacggctacccgaaacctgtggtccagataacactccaagatgtccgccgcatctacaaaaggaggcacggcctcatgcctctgggcttggaagtattttgcacagaagatgatctgtgttccgacatctacctaaagttctatgaacctcaagatagagatgatctctatttttacattgccacatacctagagcaccatgtggcggagcacactgctgagagctacatgctgcagtggcagcgtggacacctttccaactatcagtacctccttcacctcaacaacctggccgaccgcagctgcaacgacctctcccagtaccctgtgtttccatggataatacatgattattccagctcagaactagatttgtcaaatccaggaaccttccgggatctcagtaagccagtaggggccctaaataaggaacggctggagagactactgacacgctaccaggaaatgcctgaaccaaagttcatgtatgggagtcactactcttccccgggttatgtacttttttatcttgttaggattgcaccagagtatatgctgtgcctgcagaatggaagatttgataatgcagatagaatgttcaacagtattgcagaaacttggaaaaactgtctggatggtgcaacggattttaaagagttaattccagaattctatggtgatgatgtgagctttctagtcaatagcctgaagttggatttgggaaagagacaaggaggacagatggttgacgatgtggagcttcccccttgggcttccagtcccgaggactttctccagaagagcaaagatgcattggaaagcaattatgtgtctgaacaccttcacgagtggattgatctaatatttggctacaaacaaaaagggagtgatgcagttggggcccataatgtatttcatcccctgacctatgaaggaggtgtagacttgaacagcatccaggatcctgatgagaaggtagccatgcttacgcaaatcttggaatttgggcagacaccaaaacaactatttgtgacaccacatcctcgaaggatcaccccaaagtttaaaagtttgtcccagacctccagttataatgcttctatgggcagattccccaggtgaagagtcttttgaagacctgaccgaagaaagcaaaacactggcctggaataacatcaccaaactgcagttacacgagcactataaaatccacaaagaagcagttactggaatcacggtctctcgcaatggatcttcagtattcacaacatcccaagattccaccttgaagatgttttctaaagaatcaaaaatgctacaaagaagtatatcattttcaaatatggctttatcgtcttgtttacttttaccaggagatgccactgtcataacttcttcatgggataataatgtctatttttattccatagcatttggaagacgccaggacacgttaatgggacatgatgatgctgttagtaagatctgttggcatgacaacaggctatattctgcatcgtgggactctacagtgaaggtgtggtctggtgttcctgcagagatgccaggcaccaaaagacaccactttgacttgctggccgagctggaacatgatgtcagtgtagatacaatcagtttaaatgctgcaagcacactgttagtttccggcaccaaagaaggcacagtgaatatttgggacctcacaacggccaccttaatggcaccagattccatgccattcagggattgtatgtgacactgcttttagcccagatagtcgccatgtcctcagcacaggaacagatggctgtcttaatgtcattgatgtgcagacaggaatgctcatctcctccatgacatcagatgagccccagaggtgctttgtctgggatggaaattccgttttatctggcagtcagtctggtgaactgctcgtttgggacctccttggagcaaaaatcagtgagagaatacagggccacacaggtgctgtgacatgtatatggatgaatgaacagtgtagcagtatcatcacaggaggggaagacagacaaattatattctggaaattgcagtattaagtgccttttcctctcctgaatattaaattgaactctatttaatgcatttttaaaccaaacttttaaacggactggtgaatgtgcaatgttagtaattagaagttttaccacatggaaaatttgtggttttaaactttctaaatcatggtgacttcattgaaagccattagttgccattctcttagggcagataaaatgcggctgtgttaggaaaaacatgttacactgtaaggcagatgatcgtccccgtatgatgattgtcagaagacaggactaagtagcagagaatagctaagagataaattgggctggggaaacttgtcagaaagcactgaacaattaagaaattttccaagaaaatgtgcagtattctctgctacttctgaatctgttttgtcttcctaatctatcacaattgccacccatcgggttttgggtgtgtgttttcatagcgtggttactttctataatgctgtacccagattctaagaacctggagaaggattagcagttcttagtaagtttactgtgtataggaacggtttgtatttcattacagctattcatcttttctacattaaaaatatttttctctaaaga

SEQ ID NO: 57 - DNA, 3886 bp, Homo sapiens
  misc_feature: Incyte ID No: 314831.5
  unsure 226-288, 3667-3774: a, t, c, g, or other
ggttgagctgctgccgccgccgcctctgtcgtcgtcgcgagtgtggagtcgggactggagctgctgccgcggcgacgccgggggatctttgtcgctagctcccggcccttctgccccgccgccttccctcagtcagcgttgcccactcctctccggccgggcgcccctgcctccatttctcgctctctgtccaccacacacacggcccccccgatcatggatccgnnnnnnnnnnnnnnnnnnnnnnnnnnnnnnnnnnnnnnnnnnnnnnnnnnnnnnnnnnnnnnngactcggcgcctgactgctgggaccaggcggacatggaagcccccgggccgggcccttgcggcggcggcggctccctggcggcggcggccgaggcccagcgggagaacctcagcgcggccttcagccggcaactcaacgtcaacgccaagcccttcgtgcccaacgtccacgccgccgagttcgtgccgtccttcctgcggtgcccggcagcgccgccacccccagctggcggcgccgccaataaccacggagccggcagcggcgcgggaggccgtgcggcacctgtggaatcctctcaagaggaacagtcattgtgtgaaggttcaaattcagctgttagcatggaactttcagaacctattgtagaaaatggagagacagaaatgtctccagaagaatcatgggagcacaaagaagaaataagtgaagcagagccagggggtggttccttgggagatggaaggccgccagaggaaagtgcccatgaaatgatggaggaggaagaggaaatcccaaaacctaagtctgtggttgcaccgccaggtgctcctaagaaagagcatgtaaatgtagtattcattgggcacgtagatgctggcaagtcaaccattggaggacaaataatgtatttgactggaatggttgacaaaaggacgcttgaaaagtatgaaagagaagctaaagagaaaaacagagaaacttggtacttgtcttgggccttagacacaaatcaggaagaacgagacaagggtaaaacagtagaagtgggtcgtgcctattttgaaaccgaaaagaagcatttcacaattctagatgcccctggtcacaagagttttgtcccaaatatgattggtggtgcctctcaagctgatttggctgtgctggtaatctcagccaggaaaggagagtttgaaactggatttgaaaaaggaggacagacaagagaacatgcaatgttggcaaagacagcaggtgtaaaacacctaattgtgctaattaataagatggatgatccaacagtaaattggagcaatgagagatatgaagaatgtaaggagaaactagtgccatttttgaaaaaagttggcttcaatcccaaaaaggacattcactttatgccctgctcaggacttactggagcaaatctcaaagagcagtcggatttctgtccttggtacattggattaccgtttattccatatctggataatttgccgaacttcaatagatcagttgatggaccaatcaggctgccaattgtggataagtacaaggatatgggcactgtggtcctgggaaagctggaatcaggatctatttgtaaaggccagcagcttgtgatgatgccaaacaagcacaacgtggaagttcttggaatactttccgatgatgtagagactgataccgtagccccaggtgaaaacctcaaaatcagactgaaaggaattgaagaagaggagattcttccagggtttatactttgtgatcctaataatctttgtcattctggacgcacatttgatgcccagatagtgattatagagcacaaatccatcatctgcccaggctataatgcggtgctgcatattcatacctgtattgaggaggtggaaataacagccttaatctgcttggtagacaaaaaatcaggagaaaaaagtaagacccgaccccgttttgtcaaacaagatcaagtatgcattgctcgcttaaggacagcaggaaccatctgccttgagacctttaaagacttccctcagatgggtcgtttcaccttaagagatgagggtaagaccattgcaattggaaaagttctgaaactggttccagagaaagactaagcattttcttgatgaccctgcacaatactgtgaggaaaattgactgcagaagcctacttcacaccgccttctcttattttctgcccattgataaacctctccccatattttgcaaagaggaaattcacagcaaaagtccacattatgtcagctttctcatattgagagctctgctatgccactgttgaatttttcccaagattcctgtccctagccctcacttcaaactctgcttccttggacagatttggcaatagctttgtaagtgatgtggacataattgcctacaataatgaaaacctacaggaatttttttatttttcattttccccttaggcatatttagtatttttcccccaggcagatcattctgagtgtgcgagtgtgtgtgcacatgttacaaaggcaactaccatgttaataaaatattcaatttgaaatccttttcggtatttgaattgcttttgaataatgttttttatctggatgtaacattgttgcattagctttttaactttcccaagtaattgaatacattttattacttggacttttataaactctttccctacccactataaatgagacattcacagcgttcaagtttgtattaaaggaaaggattagtttgaccccttcttttgatggttaatgcatacatgcagttaaatccctttatgcaaatgtgacactgctttactaggtcttttagttatttatttattttttttttttttgccaatttatattgtaacatgatttcttgaacacagtaagttgttttaaaataaaagaacagcatactgtagtttttataagtaaagcgtaatgaaattgtacccctagagaaaattccattaacttgttaaattagtggaattaacaacaaataaagcatgtttgagacctggcaaaaattcctctggtagtatttataaatagagctgcatgcctctagtatgaaaaccgtatcagttgcaagtgccacttctacaagttactcagtttactctttgtatcagtaactttaaaggttggatgatccttgctggttaaagctaaatctcaacctagcaactaaatgaaaatatttagaatcatcagaatctgaacagactaaaattatcagcgataagcagaatcaagcagggtataagttttatctcaattatttgaaattgactgagttttcttaagtgtaaagctgaaatttgctaaccatgtttttgatgaaccacagtgcagcattgtgtgggttttagattgaatgactctctgctataattatcatgactttgaaatttttcatgagaataaatgaggaatggaggcaatttgtgggtttatccaaagcccccttgatgttgagtgttgccattgatcaaagatagcctcttttagattgtgatttctctctaaataagatactttgtatatttaatgacaagtctcttccctataattttgctcctcagaaaagaaaagcctagacagactgtatttccagtcacagaacataaaacttaatctaatgggnnnnnnnnnnnnnnnnnnnnnnnnnnnnnnnnnnnnnnnnnnnnnnnnnnnnnnnnnnnnnnnnnnnnnnnnnnnnnnnnnnnnnnnnnnnnnnnnnnnnnnnnnnnnaaaaaacaaacaaaaagagttaattcaatgactaaaacaattctgaaatcacaaagataattacgtatttgttcatctttgagatagcttctccctgggacctcagtgttct

SEQ ID NO: 58 - DNA, 7551 bp, Homo sapiens
  misc_feature: Incyte ID No: 391940.1
  unsure 7188: a, t, c, g, or other
ttttgatgccagccactgttggcatttatcagagtttatttaatcttctcatcaactactattgttaccctcagttgccaagtgaagggagcatgcgggaaggttaagtgacttgcccaagcccacacaaccggtaggagccccaattccaggccctagttccaaggctacattcttccaggcggcctccaactgggttggttaagggttgaaaggacagtgggacaataactgaggcccgtattgcccagagcgtccccatcccccgtccggagctggaagaggccatagaccgctgcctccacatcttttcctctcttcgggttcggtgactcacgacccttcttcctctctcccgggatatgacctcaaatttcaccccttatccagtagcgtctgggtccctggactaaagccgtcaaatgtaaccaattgctgaggagctctcccctaagaatcccgcctccactctgaggaacagcttcgctgatcaatggatcccctcctagacgcaatgagcgcgcggggcaagtggagaagcggctgaactgcccaatgaacaagcggtttccgtggttaggggcgtggcagaagcggtcgtcaggggcgtggcggcagttacttgggcggggccggtagcggcgggagctgcactggccaggggttccggctgtatatccatgagcgccgctggcagccggggagctgcaggaaccagactgggggcgagctgagcacctgtagtcaatcacacgcagcttttaggtttgtttgaataagagatctgacctgaccggcccaactgtacaactcttcaaggaaaattcgtatttgcagtgggaagaataagtaacattgatcaagatgaatgccatgctggagactcccgaactcccagccgtgtttgatggagtgaagctggctgcagtggctgctgtgctgtacgtgatcgtccggtgtttgaacctgaagagccccacagccccacctgacctctacttccaggactcggggctctcacgctttctgctcaagtcctgtcctcttctgaccaaagaatacattccaccgttgatctgggggaaaagtggacacatccagacagccttgtatgggaagatgggaagggtgaggtcgccacatccttatgggcaccggaagttcatcactatgtctgatggagccacttctacattcgacctcttcgagcccttggctgagcactgtgttggagatgatatcaccatggtcatctgccctggaattgccaatcacagcgagaagcaatacatccgcactttcgttgactacgcccagaaaaatggctatcggtgcgccgtgctgaaccacctgggtgccctgcccaacattgaattgacctcgccacgcatgttcacctatggctgcacgtgggaatttggagccatggtgaactacatcaagaagacatatcccctgacccagctggtcgtcgtgggcttcagcctgggtggtaacattgtgtgcaaatacttgggggagactcaggcaaaccaagagaaggtcctgtgctgcgtcagcgtgtgccaggggtacagtgcactgagggcccaggaaaccttcatgcaatgggatcagtgccggcggttctacaacttcctcatggctgacaacatgaagaagatcatcctctcgcacaggcaagctctttttggagaccatgttaagaaaccccagagcctggaagacacggacttgagccggctctacacagcaacatccctgatgcagattgatgacaatgtgatgaggaagtttcacggctataactccctgaaggaatactatgaggaagaaagttgcatgcggtacctgcacaggatttatgttcctctcatgctggttaatgcagctgacgatccgttggtgcatgaaagtcttctaaccattccaaaatctctttcagagaaacgagagaacgtcatgtttgtgctgcctctgcatgggggccacttgggcttctttgagggctctgtgctgttccccgagcccctgacatggatggataagctggtggtggagtacgccaacgccatttgccaatgggagcgtaacaagttgcagtgctctgacacggagcaggtggaggccgacctggagtgaggcctccggactctggcacgctccagcagccctcctctggaagctgcgtcccctcaccccctgtttcaggtctcccatctccctcagtgacctggatctgacctcacaccatcagcagggggcacccaccatgcacacctgtctcggagtaggcagctcttcctgggagctccaggctatttttgtgcttagttactggttttctccattgcattgttaggcatggtgacaagtgacagagttcttgccctctgtccagtttcagcatctggttgcttttaagccaagtacatctagtttccctattaaaaatgtgtctgaatagcgattttgctttgccaccaaaaggcttttccctgagaacagtgaaggatgtatgtcattttgtggtggttgtatgtgtccttacatagaccttaaaaagagctcacccttccaggccaatgctgaagacacagctccgcttggggagcctgagaacccaggcttcccaggccagagtgtggcttcttaaacggcaaaggaaattcctttgagtcacaagccaagttttcgccctgtctcctgagaccatttccctacgctttgctgctgctgagagttacctgaggcacttgttaaaaattcagcctcccaggtccctcccctcggagaggctgattcactgggtctgggaaggagcctggggattttaatttttcacaagtgccccagatgattctcatcaccaagcaaattttggaaatgctgttcaacagcgcccttaaattggaaacatctttgcagctcgttttattgaaattcataatcaggggtgtcctctagctcccacggtctccagagcagcaaggccggctatggagctgccgtcgtgtgaccacagtgtgatgtctcagaagggctctgggtgggctgagcatctgggctgtgccctggctctgcttttcaccctggacaaagtcgctgtggacttcaatttcttcacctctaaaatgggggacttggaccaggtagattgctgagctcactaccaggttcaaagttcaatgacaaactcagtttactgaggtttgagagaacatccctccaggggagcctgggagctgctctcccagtctaagcatgtagatatcatcgtttgccttttgtgtgtgtgtgtcccttatttgataaaaagatgttttgagttgttttttttttaagcactcacttgtaattttagtttttaaacccaagtccctctaactttgcctttgataccaaacaattcaaaagttggatctgagtttggagaaagatatttccaacctaagtgggtattattttgaaaccagatttttaatttaatagcctatatttgtagtctgttggataggtgtttccaaagtgtgtcttctcaagtgaaaacgcaactctaggtttcaagtactccttttctccgatcctgtggtacttgaatatccaaaaaccctgcactttgaacaatcagctgttgctatctggaactaaacagaactatgagtaaaattgcctggatactttaaaaagatatttttcctccttcatctcctttgactccaggacagactggaatataagtagtgggtctgcatggatgtttcagggatcaaaggagccacctgggcgcctgagtgccaaccctcagggccacaggtgggtgtggtttgggcacgggtccaagtgactgtgacgggacccgtgggcatgggtccaggtctgtaacctgaagaagttgttttctgacaatcaccaaatcatccgaatgacatcaaaagcagcccttatctcagagactgagatttctgtggtctcaacttcgctttggtataatttctggcactcaccagcctctatcattatgactttccccccagtgtattatttctctaataggtttccttttcacgttcttttagcacagactggcactttaccctctcaatttggaagttagcccctctcctctgttacttttcccttcacccaactacagctgtgatctagaacattcatagtcatatttctgctactactaccttcatttatcaagactttttatgagaataggtaaaccaagcaataacttcctaggactgaatcaccaccccagaagagcgagaggctcctttcatatgcctgaggccacaccccttaacctgttctgacaaaatagtggctggcccatgtaccagctccattcagaaattcaggaagagaaaagacagccctgttgtcacacaaaccggtgtgggggagggtggagcctggtctgcacggcagtcctggtggcccctgtggaggacaggcagggctggcagcatagcctttgttgccacacaaccggaatttgctcccccaggactgtgggagccagtgtcccagctgaaatctttttagtgtgtggctctgaatggcactcacattccattttggctcacatgaaactaactgaagccctttgttcaagcttcaggctcttaggcatggaaatgagaatgtgactgtggctgtcttacaggaaaattcttgtttgtccctgaatgagagcacagaggcattgaattcacagagctgcaaacttgcctgataaatgagggagtggcagtttatagataggtcatcttttttccttcctccaggtgtccttgcctttcttcccaaagtcattcatttctgatgagtatatgaatccccctcttgctagtaaggttctatttgggctaaaacaaggctgaatttttaaagagtatttgaatatattttagaatcaaattgaggctataaattgcatcaatctggacaattccattgcaggaataatatgttaaaaaccaatggggagaagcacccacatctctcctgtagcactccgtgtctcataagcaatttgaagacacttacaagtaactgattccagtcaaattaggattaactgactcaaaaaatggtgtcaagtttctttaatgtttttatgttagaagtgagtttaacagacttgaagaaaactgttatcttttcctgctgtgagtttacacaaatgattccagagcagaatgaaagcagaaagctgttggttacaatattcttttaacctctctgcagcattttacacttactgggaaccttatgattcaccgtaagagtggaaatatacctgagttcgtgtcctaatggtctctaattcacattggatcgtgggcaaatcacctcacctctctgagcctgttccctcctcttagaccatctctaagaccacttcatctatttacacatcatttgcttgaacattgctgaacatctgcgtgaacttggcctctccagcccttgcaggtggaaacagctgtgtcaaggctcaaggctcacgctgaggggacttggagggagggggcttctgcattaagctttcctggtgaagacccttgatcttgtccaaagccctgtgtctttgactggcttctcttcagagtccccgttgtcatcgtaagacccttgctgtttggagggtggtcttgtgactgtggcagctgctggccgctggaatgaggagcctatctccatcctccagtgtgactcaggcagagcattgagaattcccagggcagaaatccttcctgctcaggctttcattctaaaactacagtcttcattaaagctgaactttctgggtagctgagcttatatgcccggcatctgaatgagagctctctttgtaactgtgtgacttgagatctagtttgccagctcctgggaaacaatacatgtgttcttgtttgtgtttgctcagcaagcagatgtctgagatgtaagaagcttttcttttcctgtggcattgattctgacttagagctgaagtaaagatcactgaaacatcacgtcaagttgaagtcactcataggtctttgtcctttaggcaggacaggagagtcattaagaagcatttcactgtagcattctatcacaatatcatctggaattgttttctttgcccagaaagccttaacttgcctctagagaatccctggtattacaacgatattgcggcattagaattccaactcttctgctgtggaagtttgaagcgaagctgcagcaaaaccagagaatttcctcaagtggcctgtaggctccttgttatcttatgcccccacccctccctcaacaatatgagtgatccagaactggcccaaacacctcagctctggtccctttttgcccttcttggccttactctgttgttcaaagccactttggattgcttggatgcttcgaacagccatgaaaagtagcctgcctgtggcatttagaggccaagcaattgacagaaagggtttcttctacctctgttatctaagcagagggaagtaaacctctcaccgccccccacccctcactgcccccgattacactagaattgctttcgccaaattgtagttgaagctaaggaaggggaatctggcccctgctgggagagggaactggaatgccacacaaggcaaggcctgcttccttccttcccctctgctgctgctgcctcggaacgctgcagcccaggcttcctcccacagtggcccttggaagcaggccgcagagtagacagctgctccttttggaagagtcagtcccctgtgttttctgaactgtttttcctagcatgtatgtgggtagagctttcatgcatctctagtaataataagctgaaattagttttttttttaattctccaatttaaaacttttaattaaaaagtaaattttaatgtcgaaaatgcaaacttggggagggcagaaagatcacacacaaggctgtcacttcacacttggaggattgcacagcatctgggcaaaggctctcctcacttcccagatgggggcgggcggggcagcagagacgcacctcactccttagacagtgcggcagccaggcagagggggctcctcatatcccagacgatgggcggcccaggcagagacgctcctcacttccccagatggggcggctcccgggaagcggggctccctcacttcnccagacagggtggccaggcagaggtgctcctcacttcccagaacaattctttatgaatttgataaaggactgaagtgcaactgaaagctgctagtgatgatctggtaatatacaatttgtccagtagccagtttgtttttattgtgttttctaaccataagagatcattaaaggcaaagcctgtatgacgctgtacacacacaaaaaaatggtcaccgcaggccatactaccaatgaaatggtaggtaaacaaatcttctggtcaagagaaaaaaaaaagaaatagcactctgcatgctttgctctacaagatgaatttccctagaaagaatccaatgaaggccgggcatagtggctcactcc

SEQ ID NO: 59 - DNA, 1049 bp, Homo sapiens
  misc_feature: Incyte ID No: 454958.13
gaggaggagggtgtatctcctttcgtcggcccgccccttggcttctgcactgatggtgggtggatgagtaatgcatccaggaagcctggaggcctgtggtttccgcacccgctgccacccccgcccctagcgtgggacatttatcctctagcgctcaggccctgccgccatcgccgcagatccagcgcccagagagacaccagagaacccaccatgggccccctttgagcccctgggcttctgggcatcctgttgttgctgtggctgatagcccccagcaggggcctgcacctgtgtcccaccccacccacagacggccttctgcaattccgacctcgtcatcagggccaagttcgtggggacaccagaagtcaaccagaccaccttataccagcgttatgagatcaagatgaccaagatgtataaagggttccaagccttaggggatgccgctgacatccggttcgtctacacccccgccatggagagtgtctgcggatacttccacaggtcccacaaccgcagcgaggagtttctcattgctggaaaactgcaggatggactcttgcacatcactacctgcagtttcgtggctccctggaacagcctgagcttagctcagcgccggggcttcaccaagacctacactgttggctgtgaggaatgcacagtgtttccctgtttatccatcccctgcaaactgcagagtggcactcattgcttgtggacggaccagctcctccaaggctctgaaaagggcttccagtcccgtcaccttgcctgcctgcctcgggagccagggctgtgcacctggcagtccctgcggtcccagatagcctgaatcctgcccggagtggaagctgaagcctgcacagtgtccaccctgttcccactcccatctttcttccggacaatgaaataaaggccaaaaccacatgggctgggggccagggctggatggacagacacctccccctacccatatccctcccgtgtgtggttggaaaacttttgttttttggggttttttttttctgaataaaaaagat

SEQ ID NO: 60 - DNA, 775 bp, Homo sapiens
  misc_feature: Incyte ID No: 1090481.2c
  unsure 576, 587: a, t, c, g, or other
atgaatgtaaaaatgtggaagcaactttgtatctcaggtcttaatgaacacatatgaattcacagtggagaagaccctgcatcagggaatgtggaaatgactttgctgaattctcaagccttaccaaacacatcagaaatctcactggagagaaactgtatgaatgtagagaatctgggaatacctttctgaatcccacaaaccttaatgtgtgtatgtgaactcacattggagagaaaccctgcaatttaaatggtatggtctggatgatgccccactccatatttgtaagccctaagtcctagttcctacactataactgtatttggacatagggttttcaaacaggtgagtaacttcaaatgaggttgttgggttcgatccctaatctgacatcactggtgtccctataagggaaactgaaggaaggatacacatggagaagactgtgtggatccaccagaagatggccatctacaagccaaggacagagacctggaacagatgctttcattatggcctccagaggaaaccaaccctgtctccaccttgatattgcacttccaggctccaganctgtgaggcantaaatttctcttggttaaatcattcagtctgttattttgtacagcaaccctagggaactaatactgtgaggaacttgggaaaagctttagatcaagcttgtccaacccgcaggccaggatggctttgaatgcagaccaacacaaatttttaagctttcttcaaacataataaaatttttttgtgatta

SEQ ID NO: 61 - DNA, 5290 bp, Homo sapiens
  misc_feature: Incyte ID No: 238203.11
gcacagtctgtctcttcgccggttcccggccccgtggatcctacttctctgtcgcccgcggttcgccgccccgctcgccgccgcgatgccagtgtttcatacgcgcacgatcgagagcatcctggagccggtggcacagcagatctcccacctggtgataatgcacgaggagggcgaggtggacggcaaagccattcctgacctcaccgcgcccgtggccgccgtgcaggcggccgtcagcaacctcgtccgggttggaaaagagactgttcaaaccactgaggatcagattttgaagagagatatgccaccagcatttattaaggttgagaatgcttgcaccaagcttgtccaggcagctcagatgcttcagtcagacccttactcagtgcctgctcgagattatctaattgatgggtcaaggggcatcctctctggaacatcagacctgctccttaccttcgatgaggctgaggtccgtaaaattattagagtttgcaaaggaattttggaatatcttacagtggcagaggtggtggagactatggaagatttggtcacttacacaaagaatcttgggccaggaatgactaagatggccaagatgattgacgagagacagcaggagctcactcaccaggagcaccgagtgatgttggtgaactcgatgaacaccgtgaaagagttgctgccagttctcatttcagctatgaagatttttgtaacaactaaaaactcaaaaaaccaaggcatagaggaagctttaaaaaatcgcaattttactgtagaaaaaatgagtgctgaaattaatgagataattcgtgtgttacaactcacctcttgggatgaagatgcctgggccagcaaggacactgaagccatgaagagagcattggcctccatagactccaaactgaaccaggccaaaggttggctccgtgaccctagtgcctccccaggggatgctggtgagcaggccatcagacagatcttagatgaagctggaaaagttggtgaactctgtgcaggcaaagaacgcagggagattctgggaacttgcaaaatgctagggcagatgactgatcaagtggctgacctccgtgccagaggacaaggatcctcaccggtggccatgcagaaagctcagcaggtatctcagggtctggatgtgctcacagcaaaagtggaaaatgcagctcgcaagctggaagccatgaccaactcaaagcagagcattgcaaagaagatcgatgctgctcagaactggcttgcagatccaaatggtggaccggaaggagaagagcagattcgaggtgctttggctgaagctcggaaaatagcagaattatgtgatgatcctaaagaaagagatgacattctacgttcccttggggaaatatctgctctgacttctaaattagcagatctacgaagacaggggaaaggagattctccagaggctcgagccttggccaaacaggtggccacggccctgcagaacctgcagaccaaaaccaaccgggctgtggccaacagcagaccggccaaagcagctgtacaccttgagggcaagattgagcaagcacagcggtggattgataatcccacagtggatgaccgtggagtcggtcaggctgccatccgggggcttgtggccgaagggcatcgtctggctaatgttatgatggggccttatcggcaagatcttctcgccaagtgtgaccgagtggaccagctgacagcccagctggctgacctggctgccagaggggaaggggagagtcctcaggcacgagcacttgcatctcagctccaagactccttaaaggatctaaaagctcggatgcaggaggccatgactcaggaagtgtcagatgttttcagcgataccacaactcccatcaagctgttggcagtggcagccacggcgcctcctgatgcgcctaacagggaagaggtatttgatgagagggcagctaactttgaaaaccattcaggaaagcttggtgctacggccgagaaggcggctgcggttggtactgctaataaatcaacagtggaaggcattcaggcctcagtgaagacggcccgagaactcacaccccaggtggtctcggctgctcgtatcttacttaggaaccctggaaatcaagctgcttatgaacattttgagaccatgaagaaccagtggatcgataatgttgaaaaaaatgacagggctggtggacgaagccattgataccaaatctctgttggatgcttcagaagaagcaattaaaaaagacctggacaagtgcaaggtagctatggccaacattcagcctcagatgctggttgctggggcaaccagtattgctcgtcgggccaaccggatcctgctggtggctaagagggaggtggagaattccgaggatcccaagttccgtgaggctgtgaaagctgcctctgatgaattgagcaaaaccatctccccaatggtgatggatgcaaaagctgtggctggaaacatttccgaccctggactgcaaaagagcttcctggactcaggatatcggatcctgggagctgtggccaaggtcagagaagccttccaacctcaggagcctgacttcccgccgcctccaccagaccttgaacaactccgactaacagatgagcttgctcctcccaaaccacctctgcctgaaggtgaggtccctccacctaggcctccaccaccagaggaaaaggatgaagagttccctgagcagaaggccggggaggtgattaaccagccaatgatgatggctgccagacagctccatgatgaagctcgcaaatggtccagcaagggcaatgacatcattgcagcagccaagcgcatggctctgctgatggctgagatgtctcggctggtaagagggggcagtggtaccaagcgggcactcattcagtgtgccaaggacatcgccaaggcctcagatgaggtgactcggttggccaaggaggttgccaagcagtgcacagataaacggattagaaccaacctcttacaggtatgtgagcgaatcccaaccataagcacccagctcaaaatcctgtccacagtgaaggccaccatgctgggccggaccaacatcagtgatgaggagtctgagcaggccacagagatgctggttcacaatgcccagaacctcatgcagtctgtgaaggagactgtgcgggaagctgaagctgcttcaatcaaaattcgaacagatgctggatttacactgcgctgggttagaaagactccctggtaccagtaggcacctggctgagcctggctggcacagaaacctctactaaaaagaaggaaaatgatctgagtcccaggagctgcccagagttgctgggagctgaaaaatcacatcctggcctggcacatcagaaaggaatgggggcctcttcaaattagaagacatttatactcttttttcatggacactttgaaatgtgtttctgtataaagcctgtattctcaaacacagttacacttgtgcaccctctatcccaataggcagactgggtttctagcccatggacttcacataagctcagaatccaagtgaacactagccagacactctgctctgcccttgttccctaggggacacttccctctgtttctctttccttggctcccattcactcttccagaatcccaagacccagggcccaggcaaatcagttactaagaagaaaattgctgtgcctcccaaaattgttttgagctttccatgttgctgccaaccataccttccttccctgggctgtgctacctgggtccttttcagaagtgagctttgctgctacaggggaaggtggcctctgtggagccccagcatatgggggcctggattcatttcctgcccttcctcagtttaatccttctagtttcccacaatataaaactgtacttcactgtcaggaagaaatcacagaatcatatgattctgcttttaccatgcccctgagcaatgtctgtgctagggaaacttcccgtcccatatcctgcctcagcccgccaaggtagccatcccatgaacacactgtgtcctggtgctctctgccactggaagggcagagtagccagggtgtggccctgccatcttcccagcagggccactcccggcactccatgcttagtcactgcctgcagaggtctgtgctgaggccttatcattcattcttagctcttaattgttcattttgagctgaaatgctgcattttaattttaaccaaaacatgtctcctatatcctggtttttgtagccttcctccacatcctttctaaacaagattttaaagacatgtaggtgtttgttcatctgtaactctaaaagatcctttttaaattcagtcctaagaaagaggagtgcttgtcccctaagagtgtttaatggcaaggcagccctgtctgaaggacacttcctgcctaagggagagtggtatttgcagactagaattctagtgctgctgaagatgaatcaatgggaaatactactcctgtaattcctacctccctgcaaccaactacaaccaagctctctgcatctactcccaagtatggggttcaagagagtaatgggtttcatatttcttatcaccacagtaagttcctactaggcaaaatgagagggcagtgtttcctttttggtacttattactgctaagtatttcccagcacatgaaaccttattttttcccaaagccagaaccagatgagtaaaggagtaagaaccttgcctgaacatccttccttcccacccatcgctgtgtgttagttcccaacatcgaatgtgtacaacttaagttggtcctttacactcaggctttcactatttcctttaaaatgaggatgattattttcaaggccctcagcatatttgtatagttgcttgcctgatataaatgcaatattaatgcctttaaagtatgaatctatgccaaagatcacttgttgttttactaaagaaagattacttagaggaaataagaaaaatcatgtttgctctcccggttcttccagtggtttgagacactggtttacactttatgccggatgtgcttttctccaatatcagtgctcaagacacagtgaagcaaattaaaaaaacaaaacaaaaaaaatccctgaatgatgattagagacatcaccgctaaaaaactacatttataagctaggatttgttatatgcaaatattttctgcctcttcttttgttctgtttaaaacaataaaatgcatttgtataaaaaatgctttaaa

SEQ ID NO: 62 - DNA, 4911 bp, Homo sapiens
  misc_feature: Incyte ID No: 994057.21
  unsure 2150-2172, 2174-2179, 2181-2182, 4906: a, t, c, g, or other
cctgggtctgacgcggccctgttcgagggggcctctcttgtttatttatttattttccgtgggtgcctccgagtgtgcgcgcgctctcgctacccggcggggagggggtggggggagggcccgggaaaagggggagttggagccggggtcgaaacgccgcgtgacttgtaggtgagagaacgccgagccgtcgccgcagcctccgccgccgagaagcccttgttcccgctgctgggaaggagagtctgtgccgacaagatggcggacggggagctgaacgtggacagcctcatcacccggctgctggaggtacgaggatgtcgtccaggaaagattgtgcagatgactgaagcagaagttcgaggcttatgtatcaagtctcgggagatctttctcagccagcctattcttttggaattggaagcaccgctgaaaatttgtggagatattcatggacagtatacagatttactgagattatttgaatatggaggtttcccaccagaagccaactatcttttcttaggagattatgtggacagaggaaagcagtctttggaaaccatttgtttgctattggcttataaaatcaaatatccagagaacttctttctcttaagaggaaaccatgagtgtgctagcatcaatcgcatttatggattctatgatgaatgcaaacgaagatttaatattaaattgtggaagaccttcactgattgttttaactgtctgcctatagcagccattgtggatgagaagatcttctgttgtcatggaggattgtcaccagacctgcaatctatggagcagattcggagaattatgagacctactgatgtccctgatacaggtttgctctgtgatttgctatggtctgatccagataaggatgtgcaaggctggggagaaaatgatcgtggtgtttcctttacttttggagctgatgtagtcagtaaatttctgaatcgtcatgatttagatttgatttgtcgagctcatcaggtggtggaagatggatatgaattttttgctaaacgacagttggtaaccttattttcagccccaaattactgtggcgagtttgataatgctggtggaatgatgagtgtggatgaaactttgatgtgttcatttcagatattgaaaccatctgaaaagaaagctaaataccagtatggtggactgaattctggacgtcctgtcactccacctcgaacagctaatccgccgaagaaaaggtgaagaaaggaattctgtaaagaaaccatcagatttgttaaggacatacttcataatatataagtgtgcactgtaaaaccatccagccatttgacaccctttatgatgtcacacctttaacttaaggagacgggtaaaggatcttaaatttttttctaatagaaagatgtgctacactgtattgtaataagtatactctgttatagtcaacaaagttaaatccaaattcaaaattatccattaaagttacatcttcatgtatcacaatttttaaagttgaaaagcatcccagttaaactagatgtgatagttaaaccagatgaaagcatgatgatccatctgtgtaatgtggttttagtgttgcttggttgtttaattattttgagcttgttttgtttttgtttgttttcactagaataatggcaaatacttctaatttttttccctaaacatttttaaaagtgaaatatgggaagagctttacagacattcaccaactattattttcccttgtttatctacttagatatctgtttaatcttactaagaaaactttcgcctcattacattaaaaaggaattttagagattgattgttttaaaaaaaaatacgcacattgtccaatccagtgattttaatcatacagtttgactgggcaaactttacagctgatagtgaatattttgctttatacaggaattgacactgatttggatttgtgcactctaatttttaacttattgatgctctattgtgcagtagcatttcatttaagataaggctcatatagtattacccaactagttggtaatgtgattatgtggtaccttggctttaggttttcattcgcacggaacaccttttggcatgcttaacttcctggtaacaccttcacctgcattggttttctnnnnnnnnnnnnnnnnnnnnnnntnnnnnntnnttttttgagttgttgtttgtttttagatccacagtacatgagaatccttttttgacaagccttggaaagctgacactgtctctttttcctccctctatacgaaggatgtatttaaatgaatgctggtcagtgggacattttgtcaactatgggtattgggtgcttaactgtctaatattgccatgtgaatgttgtatacgattgtaaggcttatgtcactaaagatttttattctgattttttcataatcaaaggtcatatgatactgtatagacaagctttgtagtgaagtatagtagcaataatttctgtacctgatcaagtttattgcagcctttcttttcctatttcttttttttaagggttagtattaacaaatggcaatgagtagaaaagttaacatgaagattttagaaggagagaacttacaggacacagatttgtgattctttgactgtgacactattggatgtgattctaaaagcttttattgagcattgtcaaatttgtaagcttcatagggatggacatcatatctataatgcccttctatatgtgctaccatagatgtgacatttttgaccttaatatcgtctttgaaaatgttaaattgagaaacctgttaacttacattttatggattggcacattgtattacttactgcaagagatatttcattttcagcacagtgcaaaagttctttaaaatgcatatgtctttttttctaattccgttttgttttaaagcacattttaaatgtagttttctcatttagtaaaagttgtctaattgatatgaagcctgactgattttttttttccttacagtgagacatttaagcacacattttattcacatagatactatgtccttgacatattgaaatgattcttttctgaaagtattcatgatctgcatatgatgtattaggttaggtcacaaaggttttatctgaggtgatttaaataacttcctgattggagtgtgtaagctgagcgatttctaataaaattttagttgtacacttttagtagtcatagtgaagcaggtctagaaaataagcctttggcagggaaaaagggcaatgttgattaatctcagtattaaaccacattaatctgtatcccattgtctggcttttgtaaattcatccaggtcaagactaagtatgttggttaataggaatccttttttttttttttaaagactaaatgtgaaaaaataatcactacttaagctaattaatattggtcattaaatttaaaggatggaaatttatcatgtttaaaaattattcaagcactcttaaaaccacttaaacagcctccagtcataaaaatgtgttctttacaaatatttgcttggcaacacgacttgaaataaataaaactttgtttcttaggagaaaatgattctgtaattccagtgtcactaatttatattgttctttcctctgatttttttcaggttagtgatttttttgtatacaatttaatccaaatgttatgacattcagaaatcatgaaacacagtagatatctgttataatgtggtgtatcacatggattataaagcaaagttatggtcgatttctattcttgaaagaatcaactacagtgaatcctttgcatttgaagccttaacatgcattgctttaattttgcccagggacaaattttaataatcagcaagactggtttgtgcaaagcgttgagtcatcaggtatttagagcctagccagctacccagtatccatgctgccatatcccttcattgtaaaaagtacctaaacattcgtgaaatgattttttttagctgaaaaatgctggcaagaagaattttaaagcttaaaataggtggtaaatttgaagtatgagtgtgttcacgagaaacataggcttttcaaaaaaatttttattcaaggcaaagcaaggaacatcttgagatatgtctcaagaatataaagatgtattattttaagccaaggagctgaaatatatctcagtttataaattcaggtatattctttttgtctccatggcaaccataacttttgaaccaaaaaaaattgtttttacatctttatgctgaaaatgtgtttagattaggaatatggtcgggctgaatttgctgttgctccctaaccaaatccacctcttgttttccttgtgagtccatggctaaatcaaagctgcccctgagaagagacttaatccaagcctgattgtactagtggcatcacttagaagtaggctttccctcttcctagtagatctcaatgttttataattccttaaaacagctgaaaattgggacaacatactttacgcaatgaacagtagttaaataggaaataaactagttccatataagtatacacctagagttttaattacctttataatgtttcttaaaagtgaaacttagatacaattgtgattggatacttagatactaagtgaaacttagtgtaacaattttgatctgttaaattggattttacatgtacatttgaatgccagaatttctaaataaatcccctggttaggaaattttaaaagtcaaagcttgttttcttcaaccactaccttctacattggttgacttagaccgtaagctttttaagtttctcattgtaatttaccttctcatgcagattgctgatgttttattaaaccttatttttacaaaaatgaaaaaaaaaaaaaaaaaacgcaaggagnataag

SEQ ID NO: 63 - DNA, 1613 bp, Homo sapiens
  misc_feature: Incyte ID No: 346730.5
gctcacttgttttcacaatgcagcaaaatgaaatgccttagaaaaagagtaacattccagaaaacggtgtaatttatttttcttccttaattgccccatctgtggaggatttctttgctgaacaccacatcaaagggatcttctgcatttaaaatagaagaggcatcatgctgaagagggaggggaaggtccaaccttacactaaaaccctggatggaggatggggatggatgattgtgattcattttttcctggtcccctggttgctattatttgtgacatacttggagagaaaactacctccattcttggggctttcgttgttactggtggatatctgaccagcagctgggccacaagtattccttttctttgtgtgactatgggacttctacccggtttgggttctgctttcttataccaagtggctgctgtggtaactaccaaatacttcaaaaaacgattggctctttctacagctattgcccgttctgggatgggactgacttttcttttggcaccctttacaaaattcctgatagatctgtatgactggacaggagcccttatattatttggagctatcgcattgaatttggtgccttctagtatgctcttaagacccatccatatcaaaagtgagaacaattctggtattaaagataaaggcagcagtttgtctgcacatggtccagaggcacatgcaacagaaacacactgccatgagacagaagagtctaccatcaaggacagtactacgcagaaggctggactacctagcaaaaatttaacagtctcacaaaatcaaagtgaagagttctacaatgggcctaacaggaacagactgttattaaagagtgatgaagaaagtgataaggttatttcgtggagctgcaaacaactgtttgacatttctctctttagaaatcctttcttctacatatttacttggtcttttctcctcagtcagttagcatacttcatccctacctttcacctggtagccagagccaaaacactggggattgacatcatggatgcctcttaccttgtttcctgtagcaggtatccttgagacggtcagtcagattatttctggatgggttgctgatcaaaactggattaagaagtatcattaccacaagtcttacctcatcctctgcggcatcactaacctgcttgctcctttagccaccacatttccactacttatgacctacaccatctgctttgccatctttgctggtggttacctggcattgatactgcctgtactggttgatctgtgtaggaattctacagtaaacaggtttttgggacttgccagtttctttgctgggatggctgtcctttctggaccacctatagcaggctggttatatgattatacccagacatacaatggctctttctacttctctggcatatgctatctcctctcttcagtttcctttttttttgtaccattggccgaaagatggaaaaacagtctgacctgaaagaaagaagactgcaatcaagtgagagctaaacaaaagaaaacctaaactaatgtcattggaaacaaaagcttgaaagaaacacatcgcatctacatttgtaacatgagaagg

SEQ ID NO: 64 - DNA, 563 bp, Homo sapiens
  misc_feature: Incyte ID No: 346730.2c
  unsure 59, 70, 425: a, t, c, g, or other
agtcagattatttctggatgggttgctgatcaaaactggattaagaagtatcattaccncaagtcttacnttcatcctctgcggcatcactaacctgcttgctcctttagccaccacatttccactacttatgacctacaccatctgctttgccatctttgctggtggttacctggcattgatactgcctgtactggttgatctgtgtaggaattctacagtaaacaggtttttgggacttgccagtttctttgctgggatggctgtcctttctggaccacctatagcaggtaacaccttcaccacattctgaacaaatttcaatagcaataaaagagaaaaactgatccaggattaatggtaacatgtaatgatggtatcaggttaaaagaaacagattatttctgcttttcctatatctactnactccaccaccaatgcaggaaaatctgaaggctcagattcttgtattatcttaagatgtgccttaagcagattcttatattcttgggagttgtagggcagacactggatctatgtctacttgtctggggagacaatcc

SEQ ID NO: 65 - DNA, 588 bp, Homo sapiens
  misc_feature: Incyte ID No: 458903.1
ggaatgagtaaaagtgaggcctgtccgtaggagtttaagcttgagaaagtgcagctggaaggggctcagacaccatcttcacctggggtgttatctgaggcccacctgcatcatagttaccatgctgcaaattaaaaacatagcttggagattttccatctctgggagcggggctgggaatctgaatgactttgtgttctgctactgactgacgaaaagttgagctcccagagttgaagtgatttgttccaggtcacacggttagtaggtggagctagtggtgttgaaaccatctaggtctttaggaactggtcaagtgctaggttggggcttcagttgctctgggataccagtgctgatgcccaccatgcagtctggagggtcagcagggcaagcttcatgctgtgatcatgtacagcagctgtagaaactgtttctgggtagggcagtagtatttggcctgtgggttggacagggcaggcctgcttccacccctactaaatgttccctgtactgaggacatggtctccctctgccccatcttgccccaacccccaggatgtggatgctgcctacatgagcaaggtg

SEQ ID NO: 66 - DNA, 2085 bp, Homo sapiens
  misc_feature: Incyte ID No: 482336.20
ggagagcggtaaggaatgcctttctggcttcagcagcctggaggatggggacgtctgggcgttgactcctgggttggaacttttcagcccaccccttcccccagtctcttgccactgggtctctctgcttgggcctcagggatctctaggttcttcactccctctccaagcatcctcctccgggaagccttccctcactgagtccgtttccaatgggctggaactgcggtcccccgctgttctctgcggccgtctagggatggcgctcctgcctactccggaccatccctgcttggactgaaagcctgggcttcggcggggcgggcgggcagagggcggagggcggccccaggaggggcctggcagcagagaaacggtggcccgcggccagccccgcccctacctgtggaagcccagccgcccgctcccgcggataaaaggtgcggagtgtccccgaggtcagcgagtgcgcgctcctcctcgcccgccgctaggtccatcccggcccagccaccatgtccatccacttcagctccccggtattcacctcgcgctcagccgccttctcgggccgcggcgcccaggtgcgcctgagctccgctcgccccggcggccttggcagcagcagcctctacggcctcggcgcctcacggccgcgcgtggccgtgcgctctgcctatgggggcccggtgggcgccggcatccgcgaggtcaccattaaccagagcctgctggccccgctgcggctggacgccgacccctccctccagcgggtgcgccaggaggagagcgagcagatcaagaccctcaacaacaagtttgcctccttcatcgacaaggtgcggtttctggagcagcagaacaagctgctggagaccaagtggacgctgctgcaggagcagaagtcggccaagagcagccgcctcccagacatctttgaggcccagattgctggccttcggggtcagcttgaggcactgcaggtggatgggggccgcctggaggcggagctgcggagcatgcaggatgtggtggaggacttcaagaataagtacgaagatgaaattaaccgccgcacagctgctgagaatgagtttgtggtgctgaagaaggatgtggatgctgcctacatgagcaaggtggagctggaggccaaggtggatgccctgaatgatgagatcaacttcctcaggaccctcaatgagacggagttgacagagctgcagtcccagatctccgacacatctgtggtgctgtccatggacaacagtcgctccctggacctggacggcatcatcgctgaggtcaaggcacagtatgaggagatggccaaatgcagccgggctgaggctgaagcctggtaccagaccaagtttgagaccctccaggcccaggctgggaagcatggggacgacctccggaatacccggaatgagatttcagagatgaaccgggccatccagaggctgcaggctgagatcgacaacatcaagaaccagcgtgccaagttggaggccgccattgccgaggctgaggagcgtggggagctggcgctcaaggatgctcgtgccaagcaggaggagctggaagccgccctgcagcgggccaagcaggatatggcacggcagctgcgtgagtaccaggaactcatgagcgtgaagctggccctggacatcgagatcgccacctaccgcaagctgctggagggcgaggagagccggttggctggagatggagtgggagccgtgaatatctctgtgatgaattccactggtggcagtagcagtggcggtggcattgggctgaccctcgggggaaccatgggcagcaatgccctgagcttctccagcagtgcgggtcctgggctcctgaaggcttattccatccggaccgcatccgccagtcgcaggagtgcccgcgactgagccgcctcccaccactccactcctccagccaccacccacaatcacaagaagattcccacccctgcctcccatgcctggtcccaagacagtgagacagtctggaaagtgatgtcagaatagcttccaataaagcagcctcattctgaggcctgagtgatcc

SEQ ID NO: 67 - DNA, 1996 bp, Homo sapiens
  misc_feature: Incyte ID No: 482336.14
ctcgacagctctctcgcccagcccagttctggaggggataaaaagggggcatcaccgttcctgggtaacagagccaccttctgcgtcctgctgagctctgttctctccagcacctcccaacccactagtgcctggttctcttgctccaccaggaacaagccaccatgtctcgccagtcaagtgtgtccttccggagcgggggcagtcgtagcttcagcaccgcctctgccatcaccccgtctgtctcccgcaccagcttcacctccgtgtcccggtccgggggtggcggtggtggtggcttcggcagggtcagccttgcgggtgcttgtggagtgggtggctatggcagccggagcctctacaacctggggggctccaagaggatatccatcagcactagtggtggcagcttcaggaaccggtttggtgctggtgctggaggcggctatggctttggaggtggtgccggtagtggatttggtttcggcggtggagctggtggtggctttgggctcggtggcggagctggctttggaggtggcttcggtggccctggctttcctgtctgccctcctggaggtatccaagaggtcactgtcaaccagagtctcctgactcccctcaacctgcaaatcgaccccagcatccagagggtgaggaccgaggagcgcgagcagatcaagaccctcaacaataagtttgcctccttcatcgacaaggtgcggtttctggagcagcagaacaagctgctggagaccaagtggacgctgctgcaggagcagaagtcggccaagagcagccgcctcccagacatctttgaggcccagattgctggccttcggggtcagcttgaggcactgcaggtggatgggggccgcctggaggcggagctgcggagcatgcaggatgtggtggaggacttcaagaataagtacgaagatgaaattaaccgccgcacagctgctgagaatgagtttgtggtgctgaagaaggatgtggatgctgcctacatgagcaaggtggagctggaggccaaggtggatgccctgaatgatgagatcaacttcctcaggaccctcaatgagacggagttgacagagctgcagtcccagatctccgacacatctgtggtgctgtccatggacaacagtcgctccctggacctggacggcatcatcgctgaggtcaaggcgcagtatgaggagatggccaaatgcagccgggctgaggctgaagcctggtaccagaccaagtttgagaccctccaggcccaggctgggaagcatggggacgacctccggaatacccggaatgagatttcagagatgaaccgggccatccagaggctgcaggctgagatcgacaacatcaagaaccagcgtgccaagttggaggccgccattgccgaggctgaggagcgtggggagctggcgctcaaggatgctcgtgccaagcaggaggagctggaagccgccctgcagcgggccaagcaggatatggcacggcagctgcgtgagtaccaggaactcatgagcgtgaagctggccctggacatcgagatcgccacctaccgcaagctgctggagggcgaggagagccggttggctggagatggagtgggagccgtgaatatctctgtgatgaattccactggtggcagtagcagtggcggtggcattgggctgaccctcgggggaaccatgggcagcaatgccctgagcttctccagcagtgcgggtcctgggctcctgaaggcttattccatccggaccgcatccgccagtcgcaggagtgcccgcgactgagccgcctcccaccactccactcctccagccaccacccacaatcacaagaagattcccacccctgcctcccatgcctggtcccaagacagtgagacagtctggaaagtgatgtcagaatagcttccaataaagcagcctcattctgaggcctgagtgatccaaaaaaaaagccgctctagactcgagactag

SEQ ID NO: 68 - DNA, 410 bp, Homo sapiens
  misc_feature: Incyte ID No: 066522.1
  unsure 6: a, t, c, g, or other
tctganatggcctcagtcacatgtctgacgatggtgctggctggtggccgaggccctgggttctccctgtggcttctcatcctcagctgccagcccagactcagggcaggcgggtggggatcccaccacagctggagggatgcactgcagagaagttagccgtatttaatctagggctttttatttttttcaaatgttaaaggtagtaataattgccattggggattgttgaaattagagcatgaaaaattccagaaagatatgaagaataattatctccagtacttttactccctagagaaaaccagtgagaacatgttagtatgctgctttcctttttctaggtacatgtatgtgtgtgtgtatttatatatataaatgtaatattccccatgttgtcaattattttg

SEQ ID NO: 69 - DNA, 3102 bp, Homo sapiens
  misc_feature: Incyte ID No: 300294.3
  unsure 2984-3022, 3032: a, t, c, g, or other
accgcctagtcacttttcttaaggtggctcgtcgaggcctgacttcttccccgaaatcacgtccctagacagcctcctattttaccactaactttactcctgcagttattcagcggtaggaaactgaaaccaaaaaccagtgtaagcaagtaaacatctaaactgtttcaggagccgcgtagaaggaacgcggcggtgtaccccggaagcggaagtagattctcctacagaaaggctggactacgcggagtggtgacgtttcctcattgggcggaaggttcgctggcactccgttggtcttccagctggtgggagttgacgacgcggtgctgggcgttgggaccctactttatctagttcgggaagttgggttgtggggtcatacctgtctgtctgctcccagctttcttgggtttcttccgacggcgtggggcctcgctaaggaattcccggcccctcagggccacggctttagcggtgtcttttgcgagttcttcgtaagtacatcttaaagctgtcaagatggttctagcagaccttggaagaaaaataacatcagcattacgctcgttgagcaatgccaccattatcaatgaagaggtattgaatgctatgctaaaagaagtctgtaccgctttgttggaagcagatgttaatattaaactagtgaagcaactaagagaaaatgttaagtctgctattgatcttgaagagatggcatctggtcttaacaaaagaaaaatgattcagcatgctgtatttaaagaacttgtgaagcttgtagaccctggagttaaggcatggacacccactaaaggaaaacaaaatgtgattatgtttgttggattgcaagggagtggtaaaacaacaacatgttcaaagctagcatattattaccagaggaaaggttggaagacctgtttaatatgtgcagacacattcagagcaggggcttttgaccaactaaaacagaatgctaccaaagcaagaattccattttatggaagctatacagaaatggatcctgtcatcattgcttctgaaggagtagagaaatttaaaaatgaaaattttgaaattattattgttgatacaagtggccgccacaaacaagaagactctttgtttgaagaaatgcttcaagttgctaatgctatacaacctgataacattgtttatgtgatggatgcctccattgggcaggcttgtgaagcccaggctaaggcttttaaagataaagtagatgtagcctcagtaatagtgacaaaacttgatggccatgcaaaaggaggtggtgcactcagtgcagtcgctgccacaaaaagtccgattattttcattggtacaggggaacatatagatgactttgaacctttcaaaacacagccttttattagcaaacttcttggtatgggcgacattgaaggactgatagataaagtcaacgagttgaagttggatgacaatgaagcacttatagagaagttgaaacatggtcagtttacgttgcgagacatgtatgagcaatttcaaaatatcatgaaaatgggccccttcagtcagatcttggggatgatccctggttttgggacagattttatgagcaaaggaaatgaacaggagtcaatggcaaggctaaagaaattaatgacaataatggatagtatgaatgatcaagaactagacagtacggatggtgccaaagtttttagtaaacaaccaggaagaatccaaagagtagcaagaggatcgggtgtatcaacaagagatgttcaagaacttttgacacaatataccaagtttgcacagatggtaaaaaagatgggaggtatcaaaggacttttcaaaggtggcgacatgtctaagaatgtgagccagtcacagatggcaaaattgaaccaacaaatggccaaaatgatggatcctagggttcttcatcacatgggtggtatggcaggacttcagtcaatgatgaggcagtttcaacagggtgctgctggcaacatgaaaggcatgatgggattcaataatatgtaaagaaaatgccttaatataaactgactcagttgaatacctaatttgctgagacctcagcgtttcccttctttttgcgaattggggggaaagtgtatttttcttgcttatcatgcactctttccttttcttctcgcccgcttttcccctccttttctttttccttccttctttcctccctttaatataagggagaaatacatggtttttgtggaaatcattatatgtttgctttagattttcacaaaaaccatgtattcctccctttaatataagggagaaatacatggtttttgtggaaaagcgggcgagaagaaaaggaaagagtgcatgataagcaagaaaaatacactttccccccaattcgcaaaaagaagggaaacgctgaggtctcagcaaattaggtattcaactgagtcagtttatattaaggcattttctttacatattattgaatcccatcatgcctttcatgttgccagcagcaccctgttgaaactgcctcatcattgactgaagtcctgccataccacccatgtgatgaagaaccctaggatccatcattttggccatttgttggttcaattttgccatctgtgactggctcacattcttagacatgtcgccacctgaggggaaaaaaaaaaagattttgagtcagcgtaggaggtaatataatcagtataatcagggtataatagaaagtttgatgaactgagaaaatactaagaaaaaattacataatcctatcactctaacataattctttctatttctacatattcccttctaatctttttctcaattacatactattttttgaagaccatgtaaaattctatataaaaggacatataaaaggcttttttaaggctacgatttatgctaatactttatttatatctgtgaataagccactattagcaaaattgtacccagtgttttatttnnnnnnnnnnnnnnnnnnnnnnnnnnnnnnnnnnnnnnnaagaaaaaanaaaaaaaaagaaagtagaaagtaaagtatgagtctgagagaacgtgaagatgtgtatgtatctaagaagt

SEQ ID NO: 70 - DNA, 3141 bp, Homo sapiens
  misc_feature: Incyte ID No: 474372.8
ccggtgcgaggcagagtgctagcgggagcgcgagccagcaagaggcgcctgcgcgatgtccgggcccctgagcccgcggcgctgagccagccgggacggacatgcgcgggagggcgccgcggggcagccgccgctcctccgggggaatgaaagctactggttgattttaaagtgcctgggcctcacaggtttggagatgtcccagaataaggcacaatgtcaatagcaggagttgctgctcaggagatcagagtcccattaaaaactggatttctacataatggccgagccatggggaatatgaggaagacctactggagcagtcgcagtgagtttaaaaacaactttttaaatattgacccgataaccatggcctacagtctgaactcttctgctcaggagcgcctaataccacttgggcatgcttccaaatctgctccgatgaatggccactgctttgcagaaaatggtccatctcaaaagtccagcttgccccctcttcttattcccccaagtgaaaacttgggaccacatgaagaggatcaagttgtatgtggttttaagaaactcacagtgaatggggtttgtgcttccacccctccactgacacccataaaaaactccccttcccttttcccctgtgcccctctttgtgaacggggttctaggcctcttccaccgttgccaatctctgaagccctctctctggatgacacagactgtgaggtggaattcctaactagctcagatacagacttccttttagaagactctacactttctgatttcaaatatgatgttcctggcaggcgaagcttccgtgggtgtggacaaatcaactatgcatattttgataccccagctgtttctgcagcagatctcagctatgtgtctgaccaaaatggaggtgtcccagatccaaatcctcctccacctcagacccaccgaagattaagaaggtctcattcgggaccagctggctcctttaacaagccagccataaggatatccaactgttgtatacacagagcttctcctaactccgatgaagacaaacctgaggttccccccagagttcccatacctcctagaccagtaaagccagattatagaagatggtcagcagaagttacttcgagcacctatagtgatgaagacaggcctcccaaagtaccgccaagagaacctttgtcaccgagtaactcgcgcacaccgagtcccaaaagccttccgtcttacctcaatggggtcatgcccccgacacagagctttgcccctgatcccaagtatgtcagcagcaaagcactgcaaagacagaacagcgaaggatctgccagtaaggttccttgcattctgcccattattgaaaatgggaagaaggttagttcaacacattattacctactacctgaacgaccaccatacctggacaaatatgaaaaattttttagggaagcagaagaaacaaatggaggcgcccaaatccagccattacctgctgactgcggtatatcttcagccacagaaaagccagactcaaaaacaaaaatggatctgggtggccacgtgaagcgtaaacatttatcctatgtggtttctccttagaccttggggtcatggttcagcagaggttacataggagcaaatggttctcaattttccagtttgattgaagtgcagagaaaaatcccttagattgcaaaataaaatagttgaactctctgtcttcatgtggaaggtttagagcagttgtgagatgctgttatgctgagaaaccctgactttgttagtgttggaaaaaagtcttacaagtctataatttaaagatgtgatggtggggaggggaggatggggaagctttttatatatgcatacattacatacctatatataaacttgtggtataaccatagaccatagctgcaggttaaccaattagttactatcgtagagtaatatatattcagaataataaactcaagctggagaaatgagtcctgatagactgaaaattgagcaaatggaagaagatacagtattgtttagatcagaatcattaaaaaatatttttgtttagtaagtttgaagatttctggcttttaggccttttctattttgttccatttatttttgcaggcaatcttttccatggagggcagggtatccattctttaccatgggtgtacctgcttaggttaaaaatcataccaaggcctcatacttccaggtttcatgttgcgtcttgttgagggagggagagcaggttacttggcaaccatattgtcacctgtacctgtcacacatcttgaaaaataaaacgataatagaactagtgactaattttcccttacagttcctgcttggtcccacccactgaagtagctcatcgtagtgcgggccgtattagaggcagtggggtacgttagactcagatggaaaagtattctaggtgccagtgttaggatgtcagttttacaaaataatgaagcaattagctatgtgattgagagttattgtttggggatgtgtgttgtggttttgctttttttttttagactgtattaataaacatacaacacaagctggccttgtgttgctggttcctattcagtatttcctggggattgtttgctttttaagtaaaacacttctgacccatagctcagtatgtctgaattccagaggtcacatcagcatctttctgctttgaaaactctcacagctgtggctgcttcacttagatgcagtgagacacatagttggtgttccgattttcacatccttccatgtatttatcttgaagagataagcacagaagagaaggtgctcactaacagaggtacattactgcaatgttctcttaacagttaaacaagctgtttacagtttaaactgctgaatattatttgagctatttaaagcttattatattttagtatgaactaaatgaaggttaaaacatgcttaagaaaaatgcactgatttctgcattatgtgtacagtattggacaaaggattttattcattttgttgcattattttgaatattgtcttttcattttaataaagttacccaagtcagaggaggaaaggaggaaagaaaactagggcagcagctatggaagcttggaataggaaggg

SEQ ID NO: 71 - DNA, 2558 bp, Homo sapiens
  misc_feature: Incyte ID No: 475028.7
gggcctgcgcctgcgcggagctggagtccggctgggccgcagccgcctgggagaccggcggttgccgtggggaccggtcgggcccctccctcctccggtcccccgccccaggtccttccccaccgagacgcgccggcggaccgcgggcgagtgcagccggtgacccggcgagaggcggcgccgctcccaagatgtcgcagacgggcccatgtccgaaacctacgattttttgtttaagttcttggttattggaaatgcaggaactggcaaatcttgcttacttcatcagtttattgaaaaaaaattcaaagatgactcaaatcatacaataggagtggaatttggttcaaagataataaatgttggtggtaaatatgtaaagttacaaatatgggatacagcaggacaagaacgattcaggtccgtgacgagaagttattaccgaggcgcggccggggctctcctcgtctatgatatcaccagccgagaaacctacaatgcgcttactaattggttaacagatgcccgaatgctagcgagccagaacattgtgatcatcctttgtggaaacaagaaggacctggatgcagatcgtgaagttaccttcttagaagcctccagatttgctcaagaaaatgagctgatgtttttggaaacaagtgcgctcacaggggagaatgtagaagaggcttttgtacagtgtgcaagaaaaatacttaacaaaatcgaatcaggtgagctggacccagaaagaatgggctcaggtattcagtacggagatgctgccttgagacagctgaggtcaccgcggcgcgcacaggccccgaacgctcaggagtgtggttgttaggagagcacacaggtgttcatacagtggcatttgggacacaatcgttggaacctgaagaatctgaagttttttttaccaccatctttttctactctgtatggaagtagatctttatggggaaaagagaatttggggtgttctgcaagccagtcaaagtggcacagcaaatcatataaatcgaattaaatggacaacaccgttagatgtgtatgtaaaaattttctgtttcatatttttcctttcactttcggtttaaaacatgctatatgtactgtatgtcctgtagcccagtgcggctccacagcatggaatctgatgtatgatatgatagaatgtggcactaaatgcagtttcagattttattttttttaatcatatgaactaaaattgtcaattgtgaggtgtgcttttctcatcatgttggttatattgcacaattggttatatttatgacctgatattcaaagactctggcattgatagccagtgtgttttcttatttaactccgtttactacattctacatggtgtttacgtgatccacacttgaaatactagatcagtagacattcactaatataccaaaataaaatgaaaaattgagtttttccgtgaactttatactgtccagctctgttgattttaaagcttcttcatccaggtcagttcaggaagtatatctggagtacctgctctgtttttggctgtgagactagcactaaggattctggtacctttacccaaacctactgggctactaatacttctctcagcagttgatcaaatacaatagaccatgtaagctggggccgctcatccacttccagtttgctggtctccctgctagaaaacacattgtactgtgctttttctggaattcagtataatggcatcactgcctgtttttcacatcttttgtttcctgttcattttaaggaaacctactaaatccagttaatattaaatggacaccactcattaagaaatttctttatggcttctgctgaatacttaaatgccttactacagttatccagttgacatgtttttaattcatataaggtatattgggtatattgaagtatatattgtattacaaagacttgttcttgtattttaaaatgtcagtgcaaaaaatatatggtggaacctttctttaaagttgaaatgcagtattatttaaatctgaaaggttaaaaagctttcttcaccttatatatgttcttccactgtgactttttagttgaagactagtaaattaacttttagttagaagatgcctactgcttttgttgtttattttaatcagcagagcacagagacacataaaaactctgggaaatgactaggataaaaatatcagtatgtatctgttttagatattttgagttttgctttttttatgccttgaatattttatttcaaaaagtatctgaagcaaattctcagactgaactacttcttagacctcactgtaagaatattttattcaatgtctcatttatgatagatttgcaagctgctcatttttgaacagctttttgcatgggataggagcatgtctattctaacacatcagcttattcaaaagcaagaattttaaaaataagataaatgtaaagttgttttataaacgatcctgttaattaaaccacagacaccatatatccttctgcatcctttggccaataaaagttgctggagaacc

SEQ ID NO: 72 - DNA, 2711 bp, Homo sapiens
  misc_feature: Incyte ID No: 481223.3
cgactgagccccagactggaggagaggtccgaggaggtgggcgttggactctttgcgaggaccccggcggctggcccgggggaggcggccgaagcggcggcggcggcggccgggggcgacatggcggaggagcaggatctatcggaggtggagctgagccccgtgggctcggaggagccccgctgcctgtccccggggagcgcgccctcgctagggcccgacggcggcggcggcggatcgggcctgcgagccagcccggggccaggcgagctgggcaaggtcaagaaggagcagcaggacggcgaggcggacgatgacaagttccccgtgtgcatccgcgaggccgtcagccaggtgctcagcggctacgactggacgctggtgcccatgcccgtgcgcgtcaacggcgccagcaaaagcaagccgcacgtcaagcggcccatgaacgccttcatggtgtgggctcaggcagcgcgcaggaagctcgcggaccagtacccgcacctgcacaacgctgagctcagcaagacgctgggcaagctctggaggctgctgaacgaaagtgacaagcgccccttcatcgaggaggctgagcggctccgtatgcagcacaagaaagaccacccggactacaagtaccagcccaggcggcggaagaacgggaaggccgcccagggcgaggcggagtgccccggtggggaggccgagcaaggtgggaccgccgccatccaggcccactacaagagcgcccacttggaccaccggcacccaggagagggctcccccatgtcagatgggaaccccgagcacccctcaggccagagccatggcccacccacccctccaaccaccccgaagacagagctgcagtcgggcaaggcagacccgaagcgggacgggcgctccatgggggagggcgggaagcctcacatcgacttcggcaacgtggacattggtgagatcagccacgaggtaatgtccaacatggagacctttgatgtggctgagttggaccagtacctgccgcccaatgggcacccaggccatgtgagcagctactcagcagccggctatgggctgggcagtgccctggccgtggccagtggacactccgcctggatctccaagccaccaggcgtggctctgcccacggtctcaccacctggtgtggatgccaaagcccaggtgaagacagagaccgcggggccccaggggcccccacactacaccgaccagccatccacctcacagatcgcctacacctccctcagcctgccccactatggctcagccttcccctccatctcccgcccccagtttgactactctgaccatcagccctcaggaccctattatggccactcgggccaggcctctggcctctactcggccttctcctatatggggccctcgcagcggcccctctacacggccatctctgaccccagcccctcagggccccagtcccacagccccacacactgggagcagccagtatatacgacactgtcccggccctaaagggggccctgtcgccaccaccccccgcccagcccctgcccccagcctgtgtgccctgttccttgcccacctcaggcctggtggtggcagtggaggaggctgaggaggctgaagaggctgacaggtcggggggctttctgtctggctcactgccctgatgacccacccgccccatccaggctccagcagcaaagccccaggagaacaggctggacagaggagaaggaggttgactgttgcacccacactgaaagatgaggggctgcaccttcccccaggaatgaccctctatcccaggacctgagaagggcctgctcaccctcctcggggaggggaagcaccagggttggtggcatcggaggccttaccactcctatgactcctgttttctctctcacagatagtgagggtctgacatgcccatgccacctatgccacagtgcctaagggctaggccacccagagactgtgcccagagctggccgtgtctcccactcaggggctgagagtagctttgaggagcctcattggggagtggggggttcgagggacttagtggagttctcatcccttcaatgccccctccctttctgaaggcaggaaggagttggcacagaggccccctgatccaattctgtgccaataacctcattctttgtctgagaaacagcccccagtcctcctccactacaacctccatgaccttgagacgcatcccaggaggtgacgaggcaggggctccaggaaaggaatcagagacaattcacagagcctccctccctgggctccttgccagctccctcttcccttactaggctctatggcccctgctcagtcagccccactccctgggcttcccagagagtgacagctgctcaggccctaacccttggctccaggagacacagggcccagcacccaggttgctgtcggcaggctgaagacactagaatcctgacctgtacattctgcccttgcctcttaccccttgcctcccagtggtatttgaataaagtatgtagctatatctgcccctattttcctgttctgcagccccccaaatccacatgtaactcattactgtctcctgttatttatctcagtagtcccctctcctagccactctagcccctattaactctgcattaagcattccacataataaaattaaaggttccggttacctgctt

SEQ ID NO: 73 - DNA, 2396 bp, Homo sapiens
  misc_feature: Incyte ID No: 332499.1
  unsure 24, 34, 1061-1365: a, t, c, g, or other
cgccgtgtccgaggagctcaagtngtggcacgancgtgcacgcctccggagcacccgcccccactcactggaccgccaaggagctttccgggtcaggagcctgccccttgggagagagggcttcggacgagccctgggaccccgggcacaggtgcccacagtttgtgtgctgcggagatcgcctgatggggcccctgtgcaagtctttgtacctgaaaaaggagagatcatcagccaggtgtaactctgcgccccacgctggaaaaaactgtttcatagaggggctgggctgagacccccccacccctgagtgcctctttcagctcccccatccccatcgcaggccgatgacctggagctgagaccttttattattttttttttacacgacttttttcagaagccctgacctaaggatttatatatgtggattgtcctcaatacccctgtgatatgattatgttttatcccccagagtttggcctactggacttaaggccttgcctgtctgactgacagcctctatctccttatataagacaagtggcaggggacgagtgaagcagagtgagccaccttgggagttctccaacgctctgtgctctggttctaagaaattccctggggaactgcccctggccctcctgtcccactattgctggaggctggacatggtacatactcatgcacatgactctcccccatttcccaggtctctgggtaccccagcctgggctgggggagaatctcttcccccttttctaatgtgctctgtgatgcacacaccaagtggtaggtcaaaggtcagtatatcccggtggtgtattgtcttgctagaccctgctattttcctgaccccctaaatcctctttagggacccagtcactataccctgtctatgccctgtgggctcccagacccctgagctttgagtcagtggcatcacagtttgtagcctcagggggtctggctgggggctggtccatgcttgtggttagtggacagcagccaccctttgacagctacctctgggcatctcaagggcttgcagccccactgcnnnnnnnnnnnnnnnnnnnnnnnnnnnnnnnnnnnnnnnnnnnnnnnnnnnnnnnnnnnnnnnnnnnnnnnnnnnnnnnnnnnnnnnnnnnnnnnnnnnnnnnnnnnnnnnnnnnnnnnnnnnnnnnnnnnnnnnnnnnnnnnnnnnnnnnnnnnnnnnnnnnnnnnnnnnnnnnnnnnnnnnnnnnnnnnnnnnnnnnnnnnnnnnnnnnnnnnnnnnnnnnnnnnnnnnnnnnnnnnnnnnnnnnnnnnnnnnnnnnnnnnnnnnnnnnnnnnnnnnnnnnnnnnnnnnnnnnnnnnnnnnnncttctaacgttttttcatcatagtcccaaaaaccaatactttacaagtggttttggaaaggcaccacttttgtggcatgttctggttgggagagggagtcacagttcctactccccccaccagctatgcttctgctctgagaaggtggttatttatacaaacatggacatactcactcccaagggctgatgagatgctgaattttctttgggggcattcattaattgtcccagctgcagcgactggagcaagtctggaagctgcctgtgctaagaccacccagctgtccctgggttctcatcctagggccttctttgcttccaggtcaggggacctgcttcaatgagaaagcaactgaattgaggctaggagaggtagggagagctgagttctgacttcacctgtgcagaactctctgcccccatgttacctggactggaacagactgtgaatatagcagaaggttccaagaactctggtgtctgacctagaagaggcacagttctctctactggaaagaaaacgatgtagccgattgcacaagggtgccaagggaagacccaggatggcccatcaaaggaacctgggggaggatgcaggaggctgaagggatgcacctggcatttctctcactgtgctcttaccgcatcagcaacccccaacttttgggcctactctgccccccatgcgtgaataccctgcttggatgctgtgcttttccggtttgtctctaagcccctttctccagggcatgttggtttccctggcctctcagtgtcctaactggagcccagagtgccttgttctgagccaggagacggctgagcactggccctccacacctaagcgtcctttacattaacttattggtcttgtataacacctggtgccattgccaagtggctgtgtcctcagctacagagctggaattgtgtggggtttagtgctaaatacttcaataaagtctgttttttgtgattggctgagctggggatgagggattttttatttttatttatttttattttttg

SEQ ID NO: 74 - DNA, 1907 bp, Homo sapiens
  misc_feature: Incyte ID No: 234340.7
ctcgagccgcggctgtctgacttcctcccagcacattcctgcactctgccgtgtccacactgccccacagacccagtcctccaagcctgctgccagctgccctgcaagcccctcaggttgggccttgccacggtgccagcaggcagccctggggctgggggtaggggactccctacaggcacgcagccctgagacctcagagggccaccccttgagggtggccaggcccccagtggccaacctgagtgctgcctctgccaccagccctgctggcccctggttccgctggccccccagatgcctggctgagacacgccagtggcctcagctgcccacacctcttcccggcccctgaagttggcactgcagcagacagctccctgggcaccaggcagctaacagacacagccgccagcccaaacagcagcggcatgggcagcgccagcccgggtctgagcagcgtatcccccagccacctcctgctgccccccgacacggtgtcgcggacaggcttggagaaggcggcagcgggggcagtgggtctcgagagacgggactggagtcccagtccacccgccacgcccgagcagggcctgtccgccttctacctctcctactttgacatgctgtaccctgaggacagcagctgggcagccaaggcccctggggccagcagtcgggaggagccacctgaggagcctgagcagtgcccggtcattgacagccaagccccagcgggcagcctggacttggtgcccggcgggctgaccttggaggagcactcgctggagcaggtgcagtccatggtggtgggcgaagtgctcaaggacatcgagacggcctgcaagctgctcaacatcaccgcagatcccatggactggagccccagcaatgtgcagaagtggctcctgtggacagagcaccaataccggctgccccccatgggcaaggccttccaggagctggcgggcaaggagctgtgcgccatgtcggaggagcagttccgccagcgctcgcccctgggtggggatgtgctgcacgcccacctggacatctggaagtcagcggcctggatgaaagagcggacttcacctggggcgattcactactgtgcctcgaccagtgaggagagctggaccgacagcgaggtggactcatcatgctccgggcagcccatccacctgtggcagttcctcaaggagttgctactcaagccccacagctatggccgcttcattaggtggctcaacaaggagaagggcatcttcaaaattgaggactcagcccaggtggcccggctgtggggcatccgcaagaaccgtcccgccatgaactacgacaagctgagccgctccatccgccagtattacaagaagggcatcatccggaagccagacatctcccagcgcctcgtctaccagttcgtgcaccccatctgagtgcctggcccagggcctgaaacccgccctcaggggcctctctcctgcctgccctgcctcagccaggccctgagatgggggaaaacgggcagtctgctctgctgctctgaccttccagagcccaaggtcagggaggggcaaccaactgccccagggggatatgggtcctctggggccttcgggaccctggggcaggggtgcttcctcctcaggcccagctgctcccctggaggacagagggagacagggctgctccccaacacctgcctctgaccccagcatttccagagcagatcctacagaagggcagtgactcgacaaaggccacaggcagtccaggcctctctctgctccatccccctgcctcccattctgcaccacacctggcatggtgcagggagacatctgcacccctgagttgggcagccaggagtgcccccgggaatggataataaagatactaggcgc

SEQ ID NO: 75 - DNA, 1188 bp, Homo sapiens
  misc_feature: Incyte ID No: 234340.15c
ccctttttttttttttttcagttctctagtatctttattatccattcccgggggcactcctggctgcccaactcaggggtgcagatgtctccctgcaccatgccaggtgtggtgcagaatgggaggcagggggatggagcagagagaggcctggactgcctgtggcctttgtcgagtcactgcccttctgtaggctctgctctggaaatgctggggtcagaggcaggtgttggggagcagccctgtctccctctgtcctccaggggagcagctgggcctgaggaggaagcacccctgccccagggtcccgaaggccccagaggacccatatccccctggggcagttggttgcccctccctgaccttgggctctggaaggtcagagcagcagagcagactgcccgttttcccccatctcagggcctggctgaggcagggcaggcaggagagaggcccctgagggcgggtttcaggccctgggccaggcactcagatggggtgcacgaactggtagacgaggcgctgggagatgtctggcttccggatgatgcccttcttgtaatactggcggatggagcggctcagcttgtcgtagttcatggcgggacggttcttgcggatgccccacagccgggccacctgggctgagtcctcaattttgaagatgcccttctccttgttgagccacctaatgaagcggccatagctgtggggcttgagtagcaactccttgaggaactgccacaggtggatgggctgcccggagcatgatgagtccacctcgctgtcggtccagctctcctcactggtcgaggctgggtggccagggagggtggcggtgagtgggaatgggaggccagtcccggcttcattggcagccacccctccaccccacccgagcccccgcctccaccctgccgctgcctggctcaccacagtagtgaatcgccccaggtgaagtccgctctttcatccaggccgctgcagggcaaggagagggggttggggacccaggagaggccccgagggtggaggaggggaggcgtttgggtgggactgtggggccacaggagcccctctgtggctgggggttgcccctgtggctccctgcctcctgccaacctggggaggcaagctggttacaagaagctgcttcactggaagaaaattcaggatttcagagctggg

SEQ ID NO: 76 - DNA, 1891 bp, Homo sapiens
  misc_feature: Incyte ID No: 255778.11
  unsure 44, 74, 91, 97, 114, 135: a, t, c, g, or other
ttaagaaaaggtggttaaatttttcctggggggtcccattaggnaggttaggccaattttaattttccttaaanttccttaaatggcttcntccagnggggaaattaccagggnaaatatttaagaaaagccaangtccataatttttaaaatctggtttttaggaagactgaatttgacattgtatttctgtcccttgatcagcatgtcaataaacatttagcacttttcaatattaagacagaaaagcaatgaaatagcagaggtgaaatgaattttcaccaaatatttagaaaaaagagtatgatgaaagaaaagttgtatttttaagtgtttttatataggaattttaaaatatataggatattgaaacattcagttagtatgcttctttaattttttttctccctgaaattatagcgtcaccgagtcgttggcgctgtcatgggcgggtgtgctgaagaagaccactggccttgtgggattggctgtgtgcaatactcctcacgagaggctaagaatattgtacacaaagattcttgatgttcttgaggaaatccctaaaaatgcagcatatagaaagtatacagaacagattacaaatgagaagctggctatggttaaagcggaaccagatgttaaaaaattagaagaccaacttcaaggcggtcaattagaagaggtgattcttcaggctgaacatgaactaaatctggcaagaaaaatgagggaatggaaactatgggagccattagtggaagagcctcctgccgatcagtggaaatggccaatataattattaagtgactttggtgtgttcatgggaaactgatgtaattaaatattctgttatattaagagcgtgttcttattactgacattttgtaatcaagaaaagtgatatagaaaatatgtaggagactgttaaaattggtgattatggtaatatggtcatgtgaatcaatttttgatttataaagtactcacacaagttgtttcaaagatgatatttctgtgaacagagaggccatgggaagatttgaaaattattaaagaaaaattcctacagattttcaatgcagagaccataatcaaaaagtaaactttctttagtagtatgttcaatacatcatttaattttttaagttatcctgaagaaggaaaggtccttaattattatagtctaaacaaatttatagattactgtttgaagtaaataatacgagtgaatattttcaaatgtgataaaatagcacaagtggctggtgataaaatttgaaattatggttaaccctcagctgtgatcttatgtatgtaaagtgaaatttaaatagataattataggttgattacaaaatccatagtgtcattttattttagtcattattgaattataccatttactctgttttcttatagtcttaattttattatattttgttgttactgtattatatttgaaaaccttcaaattagaatacattgtacagttaaagaaattgacttggtacttaaaagaaagatttcccattgcatacaggttattggagaaattttccttttgttgcatttgtggaagttagttttctggcccgtggcctttaattttcttaatcaacctaattacatcaggatagaggtagagtttctgtaaaagaagagacattaagagttcctgaaatttatatctggcatacggataggcttatattcaaaacatcttagtcatacgaccataaattaaaagtggagtcactaaatagtttgcagtacgtttctaatataagtgtaggtgggtatcaaaacaagacaaatgctgttcagggaaagaagttggcaagcttaaggttaaacaaaaataaaattacatgtgttttcgccttcctagaaa

SEQ ID NO: 77 - DNA, 2086 bp, Homo sapiens
  misc_feature: Incyte ID No: 317586.1
  unsure 1524: a, t, c, g, or other
ctttgtataaggctcagctaaaagggaaattgagtgggtcaggtaccacggatactatacactctattgcatgattctcctgcctacatcagaagacgtttataagcctattttaaaggataccagttggaatctctcttttattaatcaccaagagaaccatgaacaagctgtttatcatttgactcatcatttaatcttgatttccagcttctcacacttgaaagaagacataatacatttctcacaggattctgggactattaactgaacttatgtgtgtaaaaggaattcatacaatgaaagcactagaaataattattatacttataaccattgtatttttacatgtttaaaatatagccataattagcctactcaaatccaagtgtaaaagtaaaatgatttgctttcgttttgttttccttgcttaggggatcatggacattgaagcatatcttgaaagaattggctataagaagtctaggaacaaattggacttggaaacattaactgacattcttcaacaccagatccgagctgttccctttgagaaccttaacatccattgtggggatgccatggacttaggcttagaggccatttttgatcaagttgtgagaagaaatcggggtggatggtgtctccaggtcaatcatcttctgtactgggctctgaccactattggttttgagaccacgatgttgggagggtatgtttacagcactccagccaaaaaatacagcactggcatgattcaccttctcctgcaggtgaccattgatggcaggaactacattgtcgatgctgggtttggacgctcataccagatgtggcagcctctggagttaatttctgggaaggatcagcctcaggtgccttgtgtcttccgtttgacggaagagaatggattctggtatctagaccaaatcagaagggaacagtacattccaaatgaagaatttcttcattctgatctcctagaagacagcaaataccgaaaaatctactcctttactcttaagcctcgaacaattgaagattttgagtctatgaatacatacctgcagacatctccatcatctgtgtttactagtaaatcattttgttccttgcagaccccagatggggttcactgtttggtgggcttcaccctcacccataggagattcaattataaggacaatacagatctaatagagttcaagactctgagtgaggaagaaatagaaaaagtgctgaaaaatatatttaatatttccttgcagagaaagcttgtgcccaaacatggtgatagattttttactatttagaataaggagtaaaacaatcttgtctatttgtcatccagctcaccagttatcaactgacgacctatcatgtatcttctgtacccttaccttattttgaagaaaatcctagacatcaaatcatttcacctataaaaatgtcatcatatataattaaacagctttttaaagaaacataaccacaaaccttttcaaataataataataataattnttaaaaatgtcttttaaagatggcctgtggttatcttggaaattggtgatttatgctagaaagcttttaatgttggtttattgttgaattcctagaaaagttttatgggtagatgagtaaataaaatattgtaaaaaaacttattgtctataaagtatattaaaacattgttggctaatataatttgaaaaaaagtggttttttggaagacttaggatattatggtgctacataatttttcctcgatgctctcttcctctcatctttcttgtctcttaaattactttacttccttgcacactttgccatacaagaatgaacatgagcttttcttgtgtagatctgagttgaaatcctgtggacactgggcgaattactttttagatctgtagctctgactcctcaggcataaaatgggaataatgcttttacagtttagtggcggaactaaactcccaaaattatttgttatatggatcaagtaataacgtcagtaatgtttttggtacaaagtcattatttaataaaagttattgctccatcttgcttgcccccccaaaaa

SEQ ID NO: 78 - DNA, 1480 bp, Homo sapiens
  misc_feature: Incyte ID No: 1093574.1c
ggggggtgtgtgtgtgagcgcgctcggaggtttcgggccagccaccgccgcgcaagctagaagcgccccagcccggcaagctggctcacccgctggccacccagcacagcccgctggcccctctcctgcagcccatctggcggagcgcgcggcgcgcggcggcaggagaatggcatcagaactggcaatgagcaactccgacctgcccaccagtcccctggccatggaatatgttaatgacttcgatctgatgaagtttgaagtgaaaaaggaaccggtggagaccgaccgcatcatcagccagtgcggccgtctcatcgccggggctcgctatcctccaaccccatgagcacgccgtgcagctcggtggcccctttccccagcttctcggcgcccaggccgggctcgggcagcgagcagaaggcgcacctggaagacttactactggatgaccggctacccgcagcagctgaaccccgaggcgctgggcttcagccccgaggacgcggtcgaggcgctcatcagcaacagccaccagctccagggcggggggcgcctgcacccgcaccacgccgccggcggcctgcacttcgacgaccgcttctccgacgagcagctggtgaccatgtctgtgcgcgagctgaaccggcagctgcgcggggtcagcaaggaggaggtgatccggctgaagcagaagaggcggaccctgaaaaaccgcggctatgcccagtcctgccgcttcaagagggtgcagcagagacacgtcctggagtcggagaagaaccagctgctgcagcaagtcgaccacctcaagcaggagatctccaggctggtgcgcgagagggacgcgtacaaggagaaatacgagaagttggtgagcagcggcttccgagaaaacggctcgagcagcgacaacccgtcctctcccgagtttttcatgtgagtctgacacgcgattccagctagccaccctgataagtgctccgcgggggtccggctcgggtgtgggcttgctagttctagagccatgctcgccaccacctcaccacccccacccccaccgagtttggcccccttggccccctacacacacacaccacacataggcaccacagtctcacatgcacgtgcatccttgctcatgcacaccacacatgcacacccacgcaagcaccagtcacacgtgcacacacgtgcaccctctcatgcacgcacacaccacacatacgcacacccacacaggcaccagtcacacgtgcacacaccacacaccctcttgtgcatgcacacaccacacacacgcacacccacacaggtaccacagtctcacacatcacatgcaccacacaggtatgccctcttgtgcatgcacacaccacacatctgcacacccacggaagcaccagtctcacatctgcacgtgcatactcatgaatgcaccacacagtctcacgtgcacacacacaccacacacgcactt

SEQ ID NO: 79 - DNA, 233 bp, Homo sapiens
  misc_feature: Incyte ID No: 355658.1
  unsure 11, 18, 23, 27, 32, 38, 42, 46, 59, 80, 89, 111, 116, 123, 137, 150, 155,167-168, 171, 177, 179, 182, 184, 199, 212, 229: a, t, c, g, or other
tgatgtgaaanaatccanttgcntgangtcanagagtnttanaatnggcagatggagtngacatcgttgaccctgattanacctaatcngatgacatgaattcaaacagtngtcanacgtaangaaggctttatgantttttgaactggngaaanacaaagcaaaannaanacagtnanaantnttcagaaatcttgtntttatcttgcacncttgtccttctgtgttncccg

SEQ ID NO: 80 - DNA, 2746 bp, Homo sapiens
  misc_feature: Incyte ID No: 201342.4
  unsure 662, 775-807: a, t, c, g, or other
aacctcttatccagacatgccacctggcgtggcacttctggaggactccttcatgatccaccaagtgaaattgccaaagatggccggctcgaggccttgctggatgagtgtgccaacccaaagaagcgctatggcagattccaggctgcaaaagaactgcgtgaatacctagcacaattaagtaacaacgtgaggtagtctatggtgaacttttctttttttctccatttaaacagcactggctaaaactaaaccaccaaaaaacgatctgaaaaaatgaaatttggaagtgttacattcagaggatgataaacttgcactgatagatcttaatgttaacatccatcaaaataagacattacttcaaaaatcacatgatgcttctgcaaataagtatgttcttatactttggaggcttgagctgtcatcagctgctccccactaccccggaatgcttgagtggattaatgaatattgttaagctattggaaatgagtctgatagtacattggcttgtgtatcaaagggtacttggtacttagtttgcatttactatcatgattttgtgaatctcttgcatttactttgaatgtcaagtcagattggtctgttttataggccgctttttccttctgatgtgtagggttttttccccctttttntttttaattaaattttgaaaattcaggttactgtaggtgttcatttaaatttttaatagttgtcattcagtgctatttggtacatatttactgttagggcaggattcccaggnnnnnnnnnnnnnnnnnnnnnnnnnnnnnnnnngctaaatattacattatgtaaatacttcttttcaccaacttctgtagtttcaccattgcatggtgtcatttcaggttatttaacagttatatccctctatgccaataattagaagtgtacactaaacatgaagtttggcatatgttgcaaaatgtcattttatcttttctaaaggctttaagaagaatatactagaatctatatattgatgttaattttgattcagaaaaaaaaatacaacccagtatctaaaaagtgttaactagtccaagatagtaatgcatatgccaaagaaatattacacctaatctcatgtttagaatttaaaatagaattggtcagctacttattcttaccaccctacttccagtattttagctctgtcattattaaattcagatcttcctgattattttttctgttgaaagttaaactactgctttcaagtaatttaaagttatcctaccttttattcatgggtagttttgcaaaattaacatggtagccattgtttgaatttaatcgggcatcataacttttcatttattgaggaactaatcattattactataaagcatacaaattagccagtcagcacactttggtcttctttacctaagggttaaacatcagaacatcaaatttaattatttgcatagaaatgtgtgggctctttaaaaaatgttacagtatataagttgactatcactaacaggtaatatttttctgtttgaagttgttacttttgtttacagcaaagtttgatgtagtgtgcagtagtgagctctagactgatctttttctaaatcagaaagtgattaaagtatgcacaaccaaaggcaggtttttctttttcatttattcagcaactatttattaagcatcaactctgtgccaggcaccgttactagctgctacatactgtctgaacatgacatacggttaagtaactttacaattattatcaaatacttcaatgtagatatttcttaagttgaaatagcattaactaggataatgctttcatgttattttattgtcttgtgatagaaattcaacttgtaccatctaaaactaggttgctataaaaataggaggatgaagtcaataaagtttatgccagtttaaaaactggaaggaaaaggtaagagctctccattataaaatagttgcattcggttaatttttacacattagtgcattgcgtatatcaactggccctcaatgaagcatttaagtgcttggaattttactaaactgacttttttgcaactttgggagatttttgaggggagtgttgaaaattgccaaacactcacctcttactcaaaacttcaaataaaatacacattttcaagagggagcaccttttatatttgataagttttcattataaaccttataataccagtcacaaagaggttgtctgtctatggtttagcaaacatttgcttttctttttggaagtgtgattgcaattgcagaacagaaagtgagaaaacactgccagcggtgattgctacttgaggtagttttttacaactaccatttcccctccatgaaattatgtgaaatttattttatctttgggaaaagttgagaagatagtaaaagaattaggaatttaaaattacagggaaaaatatgtaagtgaaaagcaataaatattttgttcactttgctatcaagatgttcactatcagatatttattatatggcagcaatttatatttttaatcattgcccattaatagacgcagtaaaatatttttgaatcagacatttggggtttgtatgtgcattaaaattgtcttttgtactgtaagttactgttaatttgaatattttattgaactgtctccctgtgcctttataatataaagttgtttctacaacttttaatgatcttaataaagaatactttaagaatcaaaaaaaa

SEQ ID NO: 81 - DNA, 310 bp, Homo sapiens
  misc_feature: Incyte ID No: 204542.1
  unsure 123, 132, 280, 301: a, t, c, g, or other
ggtccaatatggcgacctccacgggtcgctggcttctcctccggcttgcactattcggcttcctctgggaagcgtccggcggcctcgactcgggggcctcccgcgacgacgacttgctactgnctatcaatnccgcgcggcgccttcccccgggactgcacacgggtgcgcgccggcaaccgcgagcacgagagttggcctccgcctcccgcgactcccggcgccggcggtctggccgtgcgcaccttcgtgtcgcacttcagggaccgcgcggtggccngccacctgacgcgggccgttnagcccctgc

SEQ ID NO: 82 - DNA, 339 bp, Homo sapiens
  misc_feature: Incyte ID No: 428742.1
  unsure 54, 65, 73, 82, 91, 94, 104, 189, 222, 242, 248, 282, 303, 305, 335: a, t, c, g, or other
ctataagggcatcgtaatccctcggggttccatataaagccaagtgttcagcancaaagcaggcngccagccnattccattngccctgganacncgaaaatgtnggtggcaagcagaaacgaatagctcttcatgacctggaatttttcctgcttttccagagctgcctagtgcttaatgggtctggcncatactacacacacttgacagtctgattggganggtagcaaatcaacactctnataaangtattgtgaaggtggactggctctctctgcaaangagcaggatagtaccaagtangncagcatttaaagtcttttgaacactcattntcaa

SEQ ID NO: 83 - DNA, 2922 bp, Homo sapiens
  misc_feature: Incyte ID No: 204386.1
  unsure 273-292, 997, 1036-1056: a, t, c, g, or other
cggcgcacgcgcggttgagtcctcgagtagttcgggtctcgcgggcctcttgttttggtctcgcgggctagtagggcgcacttggcggggaggcgcttgggcgcgagactaggcgtgaagagcagagctgcgcgcgcactcgggaaaggggggaagggagcagggtccaggcagggggggttaggccccctgatccccctcgttaccccgactggcacggaataaggggaggaaatgatcgagatggcggcggagaaggagccgtttctggtnnnnnnnnnnnnnnnnnnnntcaaagatgagtcgggcggagggggcggccccacggtgccaccgcaccaagaggccgcctctggggagctccgcggcgggacggagcgtggtccgggtcgttgcgcgccatctgcggggtccccagccgctgcggtcggtcgggaaagccccggggccgcggccacctcctccagtggtccccaggcgcagcagcaccgagggggcggcccccaggcgcagtcgcatggggaggcccgcctgtcggatcccccggggcgagccgctcccccggacgtgggggaggagcgccggggagggggcgggacagagctgggtccccctgctcctcctcgaccccgcaatggctatcagccccaccggccacctggggggggcgggggcaagaggagaaatagctgtaatgtagggggaggcgggggaggcttcaaacatccggccttcaagaggcgcaggcgggtgaattcggactgtgactctgtgttaccctccaacttcctcctggggggcaatatctttgatcccctgaacctgaatagcctcctggatgaggaagtgagccgcactctcaacgcggagacccctaagtcatccccccttccggccaaagggcgagatccggtggagatcctcatccccaaagatattactgacccgctcagtctcaatacttgcactgatgagggccatgtagttcttgcttcgncactcaagactggtcggaagcggcatagacaccggggannnnnnnnnnnnnnnnnnnnngcagccggagggagtgagagtcaccccgtgccgcccacagcccctctcacccccttactccacggggagggcgcctcacagcagccgcggcacaggggccagaaccgggatgccccccaaccctatgaactcaacacagccatcaactgcagggatgaagtggtgtctccccttccatctgctctgcagggtccctcaggctccctatcagcccctccagctgcctcagttatctctgcacccccatcttcctcctcccgacatcgcaaacgtcgcaggacttccagcaagtcggaggcaggggctaggggtggaggccagggttccaaggaaaagggccgagggagttggggaggccgccaccaccaccaccacccactgcctgcagcaggcttcaaaaagcaacagcgcaagttccagtatgggaattattgcaaatactatgggtaccgcaatccttcctgtgaggatgggcgccttcgggtgttgaagcctgagtggtttcggggccgggacgtcctagatctgggctgcaatgtgggccatctgaccctgagcattgcctgcaagtggggcccgtcccgcatggtgggcctggatatcgattcccggctcatccattctgcccgccaaaacatccgacactacctttccgaggagctgcgtctcccaccccagactttggaaggggacccgggggcagagggtgaggaagggaccaccaccgttcgaaagaggagctgcttcccagcctcgctgactgccagccggggtcccatcgctgccccccaagtgcccttggatggagcggacacatcagtcttccccaacaatgttgtcttcgtcacgggtaattatgtgctggatcgagatgacctggtggaggcccaaacacctgagtatgatgtggtgctctgcctcagcctcaccaagtgggtgcatctgaactggggagacgagggcctgaagcgcatgtttcgccggatctaccggcacctacgccctgggggcatcctggtcctagagccccaaccctggtcgtcgtatggcaagagaaagactcttacagaaacgatctacaagaactactaccgaatccaattgaagccagagcagttcagttcctacctgacatccccagacgtgggcttctccagctatgagcttgtggccacaccccacaacacctctaaaggcttccagcgtcctgtgtacctgttccacaaggcccgatcccccagccactaagtggccccctaaacagaaagtgtgaagaggctgccctcgctgctcataaggacctgggggaagaggaaagtgtcccaaggtctttcctttctgactccaaaaatagtttcctttcttggatctgcaaagaaagcttttcttccgtcgctgcctcagcctcctccctatgcctctggcacctgcgcagcaaggctggctgtgctggagtcaccatcatcttcctctcccccagcctcccaggctggatggcatggactgtttgctgacctctgttctcttagggcatgggaggtgggaggatatcaaattctctagccctttcctcctattctcccaaggagagagattcccatttctcctcggccattgtacctagctcttgtccctagctgcatttcagtggaccatggatagagggactgagggttagacggggaagactggcagggaggcacgcaggtactgtgaaaatccttccctttgccctcccccagtgggagagggggttgggttttcaatgtgagaacagcacaataaacttgatgtctagggcagtggcccccacacctgtctcggtactgtctagctggtgggggatgggtggtgcctcccaccaga

SEQ ID NO: 84 - DNA, 3387 bp, Homo sapiens
  misc_feature: Incyte ID No: 335086.1
  unsure 158-258, 2058: a, t, c, g, or other
ggcaacaacggcggggaaggagaagtcaagacgtctggaaagaattacccagtcctggcttcgagcagcccattgaaccagagacttgaaacagccccagccaaagacttttctcccaattctgcgcttcctgggttctgctgagtcttccacaggcnnnnnnnnnnnnnnnnnnnnnnnnnnnnnnnnnnnnnnnnnnnnnnnnnnnnnnnnnnnnnnnnnnnnnnnnnnnnnnnnnnnnnnnnnnnnnnnnnnnnnagaaaaaagaaaagttaatttatttttaaagcatattttttttaagaattagactgaagtgcaacggaaacataaagagaatattagtgaaattattttttaaagtggggaagaatcaaacatttaagactcccctatcctttttaaatgttgtttttaaatttcttattttttttggccggtcgtctcaaattcatctgatctcttattacctcaattttggaaactgcccgccaccgaccctccgggaccacacagacaggctgaggacgactttatgaccaagagctgaacaagatgcattgtgagaggtttctatgtatcctgagaataattggaaccacactctttggagtctctctcctccttggaatcacagctgcttatattgttggctaccagtttatccaaacggataattactatttctcttttggactgtatggtgcctttttggcatcacacctcatcatccaaagcctgtttgcctttttggagcaccgaaaaatgaaaaaatccctagaaacccccataaagttgaacaaaacagttgccctttgcatcgctgcctatcaagaagatccagactacttaaggaaatgtttgcaatctgtgaaaaggctaacctaccctgggattaaagttgtcatggtcatagatgggaactcagaagatgacctttacatgatggacatcttcagtgaagtcatgggcagagacaaatcagccacttatatctggaagaacaacttccacgaaaagggtcccggtgagacagatgagtcacataaagaaagctcgcaacacgtaacgcaattggtcttgtccaacaaaagtatctgcatcatgcaaaaatggggtggaaaaagagaagtcatgtacacagccttcagagcactgggacgaagtgtggattatgtacaggtttgtgattcagacactatgcttgacccagcctcatctgtggagatggtaaaagttttagaagaagatcccatggttggaggtgttgggggagatgtccagattttaaacaagtacgattcctggatctcattcctcagcagtgtaagatattggatggcttttaatatagaaagggcctgtcagtcttattttgggtgtgttcagtgcattagtggacctctgggaatgtacagaaactccttgttgcatgagtttgtggaagattggtacaatcaagaatttatgggcaaccaatgtagctttggtgatgacaggcatctcacgaaccgggtgctgagcctggggctatgcaacaaaatacacagctcgatctaagtgccttactgaaacacctatagaatatctcagatggctaaaccagcagacccgttggagcaagtcctacttccgagaatggctgtacaatgcaatgtggtttcacaaacatcacttgtggatgacctacgaagcgattatcactggattctttcctttctttctcattgccacagtaatccagctcttctaccggggtaaaatttggaacattctcctcttcttgttaactgtccagctagtaggtctcataaaatcatcttttgccagctgccttagaggaaatatcgtcatggtcttcatgtctctctactcagtgttatacatgtcgagtttacttcccgccaagatgtttgcaattgcaacaataaacaaagctgggtggggcacatcaggaaggaaaaccattgttgttaatttcataggactcattccagtatcagtttggtttacaatcctcctgggtggtgtgattttcaccatttataaggagtctanaaggagtctaaaaggccattttcagaatccaaacagacagttctaattgttggaacgttgctctatgcatgctattgggtcatgcttttgacgctgtatgtagttctcatcaataagtgtggcaggcggaagaagggacaacaatatgacatggtgcttgatgtatgatcttccatgttttgacgtttgcagtcacacacaacaccttagttcctctaggggctgtacagtattgtggcatcagataatgccaccaaaggagacatatcactgctgctgggacttgaacaaagacatttatatgggtttattttcattctgccaaagtaaaacaatacatcaacaagaagaaactcagatttaacctgttatttctatgaaaatgggatgaattctttgtttatgcactttttccttactgtgcatccgcctgaaagtgttttgccctatatacctcactagccatgctttatgtgggttatcatggaagaaaaggattttggaaactcaaggaaaagttctttcaacctatacaacctaacttatggactgttttgatagatgataattttttttttttaggaaggattttctttttaactttaccaaatgaaatgccaaaggaagttttaaaggccgttggctgtgctgtattttgatataattgtactgtgtttttaaattttgtatgccaatcttaaagacaaattttgcatattctctattttacttttctgccaaaataaacctgttcttccttttttaaaataaaataagttcttaaaaaatttatacttaaaaaatcctgcccaaaatgtgaagcttggttgactgatgttcatgatagaaagaataaaatgtttctctctctctaccttttaaaattgaatagtttatttctgtgaaagaagtatttaaactttcaatattttaactttttgtttttatttcttttagaaaaggccaatatacctatcacactttggaagtaaaaatacacactttcgtgtgtacctaaaaaaaaaatcgttgaaaatcaaggccaaaggtagtgcaattttttcattaagatttaaaaaaaagggaatgatagtctttgaaagaaaacagtaggcatccagcactggacaaaacatgggtatcaaagatgaataatctttggagattctggcagtgttttcccagaacaagtcaagtggaaagtggagaaattatctgtataattttggacacatacaatgcagtttatcaaaggttttgttctgtggcctgaatttactgggtcctacctacacattgaacatgttttgcctgtcttttttttttttt

SEQ ID NO: 85 - DNA, 745 bp, Homo sapiens
  misc_feature: Incyte ID No: 228302.1
ggcagatagaatcaccaagtatctatcctcttttactttcaaatgaggaattttgtttttctgaattacacagatcatgcacttcctatttcctgttctggacctgtataaaaatgtctacacagtagaagtgacatcaaggtttaataagtatatcaatgattggcacatataaaaattgttgaaccacatactctgaacttggctaatttagttactgcaaggcctccattatccagttttattttttacacgattgaccttggccttgtagctggtgctgtgtagacctgtgttgaaaacacaatcggaatatatgaataattgaataaacagcattatggtgaggcagagacacatggagaagtgttaaaaaaaaaatgggcttcctgcctttctgcctctttttatgcagtcatctatgttacatctatcctgcctaagaaaaagctgcacatcctaccttcagagtacaaaaaggtacatctgaagctcaagactctcactgattggagagcttgtggaaaacaaaacacaccatgccaataaatgagatgaaaacttgagtttgcctttttaactatttatgttctaagttaagctttgataacattcaaatgtcaaattctctcattcttataaaaagttgaattaattgcctgtatttattttagcaattattcaatgtatttccagtataggatgtatagtataattaattttttgtaaataaaatatttttgat

SEQ ID NO: 86 - DNA, 1070 bp, Homo sapiens
  misc_feature: Incyte ID No: 1063057.1
gcgggaaattctttagtcgaagttctgactatattgcacaccagagggttcacactggtgaaaggccttttgtgtgcagtaaatgtgggaaagactttatcagaacctcccaccttgttcgacaccaaagagttcacactggagaaaggccatatgagtgcagtgaatgtgggaaggcctacagcttaagctcccacctcaatcggcaccagaaagttcacactgcaggcaggctttaggagtgctttgaatacaacaggactcatcaatcagatgttgaatttcatgtatctgaacattgacacaaaggagataccttatggtgccaggtacgtgggaaccttctagggatatgttgcactttctgacttgctcaggttttttgccagagttatgtcactgtcaatccatgtggccgaaaccatcttaactctaccagctaagataccccagcattggggaaggcagggttttgtattgtccagtccctggagaaaatcatgaaatgcctgagttcattgggggtcctcattcccttctgtatgacaggtataggtatggatatgacccatttttagccaagagggtctgagctgtatctgctggtggcttatacaaaaagtttactttcttcatggatattcttggtctcacatacttgtaatcaagtttttccagcctccaagtcacctggcctgggaaagtacttgcctcatgttgctctggtttgtgataataaaggctttacagtttaagccacatttaatcttggggcttcttcttatggtctggggtggattgaaaacaggctctgccaaactgaagacagcctttgtgcggtgcctccaactttgcctcaaatgggacagtgggttgagggagaacagttcttagtccagttttgatgttaacttccatagctgacaaagcttgttaagtaagaattaagatcttgtgtagacctgatttgtctggattttagagttatttgagagcccatatttcaccttgaggagggtgctgctgctgtgacagcctgcagtgttttgaaacagcatggattgggtgtc

SEQ ID NO: 87 - DNA, 5520 bp, Homo sapiens
  misc_feature: Incyte ID No: 199905.1
  unsure 3196-3258, 4137-4454: a, t, c, g, or other
aaatatattatctcgaggccccctcttcgcctcctccagagtatgtatgtaactgctctgtggttggaagcctgaatgtgaatcgctgcaaccagaccacagggcagtgtgagtgtcggccaggttatcaggggcttcactgtgaaacctgcaaagagggcttttacctaaattacacttctgggctctgtcagccatgtgactctagtccacatggagctctcagcataccgtgcaacagttctgggaaatgccagtgcaaagtgggtgtcattggctctatatgtgaccgatgccaagatggatattatggctttagtaagaatggctgcttgccctgccaatgcaataatcggtctgccagttgcgatgccctcacaggtgcttgtttaaactgccaggaaaatagcaaaggaaatcactgtgaagaatgtaaagaaggattttatcagagtcctgatgccactaaagaatgtcttcgctgcccttgttcagcagtgacatctacaggcagctgctctataaaatcgagtgaattggaacctgaatgtgaccagtgtaaagatggttacataggcccgaactgcaataaatgtgaaaatggctattacaattttgacagcatctgtagaaagtgccaatgtcacggccatgtggacccagttaaaactccaaagatttgtaagcccgagagtggtgagtgcatcaactgcctccataacaccactgggttttggtgtgagaactgcctagaaggttatgttcacgacctcgagggaaattgcatcaagaaagaagttattcttccaacacctgaaggttctaccattttggtttccaatgcctctttgaccacatcagtgcccacccctgttataaatagtacttttacccctacaaccctgcagactatcttttcagtaagcacttctgaaaacagcacttcagctttagctgatgtatcatggacccaatttaacatcatcattttgacagtcatcatcattgttgtggtgctgctaatgggatttgtgggggctgtatatatgtaccgcgagtaccaaaaccggaaactcaatgcccccttttggaccatcgagctgaaagaagacaatatcagtttcagcagctaccatgacagcattcccaatgcagatgtttcgggattgttggaagatgatggcaatgaagtggctcccaatgggcagctgaccctgacgacgcccatacataactacaaagcctaaggagctagaactgttctgaattgttaaaccacagtgcttgctaagacagagtcagcccctgggccagacaaagcctggctagagtttgctgagaaagccaaggcaaatagtgcatctgaaattttcaggtacaaatttgtaatgcgcttagcctatctattgctcttagttttcccatgaagatctgaagcgttcactgtcattaggacttgaagtaaagtatatttttgtaccaaaccacatgggagtatggaaaggctgaaccccatagtgcagcccaaaaccactttgacctccagatagactcctggggaagcattcaccaagccagtggtaacaagatgatgaatgtggagggggaaaagactgctggaagacttcatctccattcctgaaacattttttttaaaacagtgtcagggattatattcgttttactatacaaaaggacatcattgaggaaaagcttgtttctaggctgtatcacagtaaataatcttgattgtttctagaacaggggtagaaaagtcccaagatcttcagaagggcttggttttttcctcccaggattcttgctcagtgatgagttgaaagcacaggataagcttctaagggaggaaggcagcattggggagcaggaggctgatggtcctcctcagggtctcagtgtaaatgataaattgtctaaaaataaggaatattcctgcctctagagaaataaggtgtacatagttaatgtagcatatctggtcgacgttgtatttgtatctatttgtaaaaaaaaaatcatgtcatattttatcatctggaatttatttgtacagcagttaatggtgttgtaaaaagaaaaatatggggattgcttaaaatactgtaaaatagatggcaatattgctagagctgggactctggtgagcatccgtcatttttagtccttcttgaggacattgctgaaatttataagaggtcgaatgtttctttctttcctttctcagtctaaaagtagagttatatgctctttgacttactatgattcaagcaatagattttgaagtcagtaatcgttaagctgggacataggatgcattctccaaaaacattaatctaattagacattagccaccctatatattttacatagattaatataaaacatatcctcattaaaaaatgtttttcttgaatgtaaaagatagtcttccaaaggatagaaatattttagttccaagagaaaagccatcatattacttgggatctgtagttttcatgcctatgaaatatttataatcctccctcaccccaaataaaaaatctcctacatgtgaacatagcctgtcactcatttgccatgaggtatgtgccatctccctgcagtgctatagttctcccattgtcttcctgtctggttaatgagcagctttgtagatgggtgtgtctagttagttcttgctttttgatggagttttttcctagaggccaactactgttgctctcgtttattatgatattgacattttgggttaagcaaggtgggtgggaaaggtggtcagatgttaaatataacttattaggaggaacagtgaactgtgaagtggttagaaaaaaaataaaaacttcttattagattagacctaggaaattcaagctgacccctttgcctaacttccctagagaaaaacctagaacttggtcatccctttataggagacccctaagttgttctcagggtttggagatgatgttctggagggagtacaagcaaataatctacttctggtaatctgagggtgctttgcgtatttggccattgctcagaagaatagaggttacattatattacattatatgaaaattatttagtttttctatagccctttgtagtttgcaaagcacttttccatatgtgtgtcctctcttccacaccatagccccctgaggaagtaattgtnnnnnnnnnnnnnnnnnnnnnnnnnnnnnnnnnnnnnnnnnnnnnnnnnnnnnnnnnnnnnnntacaatgtgtgtgattattaggcttggaatcagggcctctaactctaaagcacatgttttttcaactatatgcagaaattgcctagccatggacacaagaaagctgggaggaagagttctacttgtggatgtttttaattttttttaaatatcaggagcaatccaggggccatacagctatgaagcacttagtgaaaagaacacaagaagatttactaactgaagttagtattagtgattagaaaacaaaactgccagtttgtgcttcattaaggtgaactcatctctccaagcaggaagggaaaatttgctttccctagcagttgctgcatatgtgtgtacagactgcacaattctaagaaattgtgcaaaatggcatacctgtctttctcccagatacaccgccccctgccccccccaaaaaaggtcaggattaaaggtggtgagaagtgaacatttattaaacagaagttaaaccaatagagagaaaggaggtttgttggagtctaagaggattttgaccatgtagaaattccttgaaacagaccttaaaaggtattgaaaaattgaatcacaaagaaagtttacctttaaatacttgttaatggctcctagatcatggttataatttttctcaatgggaaaaaaagtcttaaaatttgttttaaataagatcctctaatgtctcgagctttttgattctggaaataatttgctttaaaatataaatcaatcagaaagtgatctaccactgaaatcattctaggaaactagcatgggatgcactgcacaatgttctttcctctaaaggcatgggccccataaactgtggcatctggcagcaggatgccatcagtcctttagaaagcctaattttgnnnnnnnnnnnnnnnnnnnnnnnnnnnnnnnnnnnnnnnnnnnnnnnnnnnnnnnnnnnnnnnnnnnnnnnnnnnnnnnnnnnnnnnnnnnnnnnnnnnnnnnnnnnnnnnnnnnnnnnnnnnnnnnnnnnnnnnnnnnnnnnnnnnnnnnnnnnnnnnnnnnnnnnnnnnnnnnnnnnnnnnnnnnnnnnnnnnnnnnnnnnnnnnnnnnnnnnnnnnnnnnnnnnnnnnnnnnnnnnnnnnnnnnnnnnnnnnnnnnnnnnnnnnnnnnnnnnnnnnnnnnnnnnnnnnnnnnnnnnnnnnnnnnnnnnnnnnnnngtgtaaggattggaaatctgtttatttttaaataagatagcactgatgtgaatcttatttggaaattacagatactgccattaagcgatgcttttatcttcattaattcattttggtaagcgcctatgcatttctgatggttaggtgccctaggtagtgttaagtatgtccgtgtcctcccttactcccctctcgctccctctaccctctatcccctagggttcttttattaatggaatttctccagttatagagaaaaaaaatgacatttgaaaactaaagctcatttatattaatactaaggtcctgtgggcctagtgcgttactcttcccagtgatacctagattttaagagtagagaacagaggaaacatgggatgagaggagagaggttttttagacaacatttgtagacacctcaaattatatcactgttctctagcgccaatattcccaggtaaattgaccattaaagcaatactcactgacctactagtttattttggtcagctgagtaccatcaggatatttaaccctttaagtgctgttttgggagtagaaaactaaagcaacaatacttcctcttgacagctttgattggaatggggttattagatcattcaccttggtcctacactttttaggatgcttggtgaacataacaccacttataatgaacatccctggttcctatattttgggctatgtgggtaggaattgttacttgttgctgcagcagcagccctagaaagtaagcccagggcttcagatctaagttagtccaaaagctaaatgatttaaagtcaagttgtaatgctaggcataagcactctataatacattaaattataggccgagcaattagggaatgtttctgaaacattaaacttgtatttatgtcactaaaattctaacacaaacttaaaaaatgtgtctcatacatatgctgtactaggcttcatcatgcatttctaaatttgtgtatgatttgaatatatgaaagaatttatacaagagtgttatttaaaattattaaaaataaatgtatataatttgtacctattgt

SEQ ID NO: 88 - DNA, 707 bp, Homo sapiens
  misc_feature: Incyte ID No: 011329.1
ctgcttagaagcttagctgtgtaggagttaaagtgcaggggaacagatgggaacatttaatttatagaaataattctggtggagttctagggctgtgcctatttgttttagttgttgtgaagaagcaagccatcttgtatacttaaagaatgatgtcatccctaatttagtggggtgggaggagtgagagtatttaaagatcatgtggatattaagatacagaagtcataaaatatttgtaatcttcatagtatctgtaggttaagtagtggttctaatttctgggaggaagctcaagtactccttattttgttgaaccatatttaatttaaaagaccaaccagcagttgaaaattttctattgctgtttagaatagattcatcccaactttggtagaggagtccatggctgaatattgccatgagtgaagaaagattctttctcactttcttctggaagctttgttttcatcctcctttggattggcttctgagagaccataaaaagaaatgggtgttgattgcatttaatggttcctactgtgaacaagcagtaggtaccgttcttgccctttcagtatctgcagactcattttatcagaagagtgcaactgataaactttgcataagagaaaatgtactggccaaacattgattttgcttacatacacatacttaacacgcacattcttgacctacatctattt

SEQ ID NO: 89 - DNA, 1086 bp, Homo sapiens
  misc_feature: Incyte ID No: 237536.18
cgcagacgcagccgccctcggcgtcctctgtagcgggcgacctaggccgcgggacccggacggaggtagaggccaggggcagcgcgtgccgggagcggagtccgcgcccgccgccgccatgccggacagctgggacaaggatgtgtaccctgagcccccgcgccgcacgccggtgcagcccaatcccatcgtctacatgatgaaagcgttcgacctcatcgtggaccgacccgtgaccctcgtgagagaatttatagagcggcagcacgcaaagaacaggtattactactaccaccggcagtaccgccgcgtgccagacatcactgagtgcaaggaggaggacatcatgtgcatgtatgaagccgaaatgcagtggaagagggactacaaagtcgaccaagaaattatcaacattatgcaggatcggctcaaagcctgtcagcagagggaaggacagaactaccagcagaactgtatcaaggaagtggagcagttcacccaggtggccaaggcctaccaggaccgctatcaggacctgggggcctacagttctgccaggaagtgcctggccaaacagaggcagaggatgctgcaagagagaaaagctgcaaaagaggccgccgctgccacctcctgaggcagctgtgggtgcccctgctgtgtggctctgtatgactgttgctgaaaggctttgagccgatcctgcataatgttgataatttcttggtcgactttgtagtccctcttccactgcatttcggcttcatacatgcacatgatgtcctcctccttgcactcagtgatgtctggcacgcggcgggtactgccggtggtagtagtaatacctgttctttgcgtgctgccgctctataaattctctcacgagggtcacgggtcggtccacgatgaggtcgaacgctttcatcatgtagacgatgggattgggctgcaccggcgtgcggcgcgggggctcagggtacacatccttgtcccagctgtccggcatggcggcggcgggcgcggactccgctcccggacgcgttgccctggcctctacctacgtccgggtcccgcggcctaggtcgc

SEQ ID NO: 90 - DNA, 3785 bp, Homo sapiens
  misc_feature: Incyte ID No: 330878.6
ggcccagccatggcggacgaggccccgcggaagggcagcttctcggcgctcgtgggccgcaccaacggcctcaccaagcccgcggccctggccgcagcgcccgccaagccggggggcgcgggcggctccaagaagcgggtcatcaagaacttccgagacagacctgggctgcccgacaactacacgcaggacacgtggcggaagctgcacgaggcggtgcgggccgtgcagagcagcacctccatcaggtacaacctcgaggagctctaccaggctgtggaaaatctctgttctcacaaagtctccccaatgctctacaagcaactgcgtcaggcctgtgaagaccacgtccaggcacagatccttccgtttagagaagactcactagatagtgttttatttttaaagaagattaacacgtgctggcaggaccactgcagacaaatgatcatgatcagaagcatcttcctgttcttggaccgcacctatgtgctgcagaactccacgctgccctccatctgggatatgggattagaactgtttagaacccatattattagtgataaaatggttcagagtaaaaccattgatggaatcctactgctgatcgagcgcgagaggagcggcgaggccgtggaccggagcctgttgcggagcctcctgggcatgctgtctgacctgcaggtgtataaagattcatttgaactgaaatttttggaagagactaattgcttatatgctgccgaaggccaaaggttaatgcaggaaagagaggttccagaatatcttaaccatgtaagtaaacgcttagaggaagagggagacagagtaatcacttacttggaccacagcacacagaaaccactgattgcttgtgtggagaaacagctattaggagaacatttaacagcaattctgcagaaagggctcgaccacttactggatgagaacagagtgccggacctcgcacagatgtaccagctgttcagccgggtgaggggcgggcagcaggcgctgctgcagcactggagcgagtacatcaagacttttggaacagcgatcgtaatcaatcctgagaaagacaaagacatggtccaagacctgttggacttcaaggacaaggtggaccacgtgatcgaggtctgcttccagaagaatgagcggttcgtcaacctgatgaaggagtcctttgagacgttcatcaacaagagacccaacaagcctgcagaactgatcgcaaagcatgtggattcaaagttaagagcaggcaacaaagaagccacagacgaggagctggagcggacgttggacaagatcatgatcctgttcaggtttatccacggtaaagatgtctttgaagcattttataaaaaagatttggcaaaaagactccttgttgggaaaagtgcctcagtcgatgctgaaaagtctatgttgtcaaagctcaagcatgagtgcggtgcagccttcaccagcaagctggaaggcatgttcaaggacatggagctttcgaaggacatcatggttcatttcaagcagcatatgcagaatcagagtgactcaggccctatagacctcacagtgaacatactcacaatgggctactggccaacatacacgcccatggaagtgcacttaaccccagaaatgattaaacttcaggaagtatttaaggcattttatcttggaaagcacagtggtcgaaaacttcagtggcaaactactttgggacatgctgttttaaaagcggagtttaaagaagggaagaaggaattccaggtgtccctcttccagacactggtgctcctcatgttcaacgagggagatggcttcagctttgaggagataaaaatggccacggggatagaggatagtgaattgcgcagaacgctgcagtccctggcctgtggcaaagcacgtgtgctgattaaaagtcccaaaggaaaggaagtggaagatggagacaagttcatttttaatggagagttcaagcacaagttgtttagaataaagatcaatcaaattcagatgaaggaaactgttgaggaacaggttagcaccactgagagagtgtttcaggatagacaatatcagattgatgctgctatcgtcagaataatgaagatgagaaagactcttggtcataatcttctagtttctgaattatataatcagctgaaatttccagtaaagcctggagatttgaaaaagagaattgaatctctgatagacagagactatatggagagagacaaagacaatccgaatcagtaccactacgtggcctgacgcatctgcagacggttccccttcatgaaacactagaatgtaccctcagagcaggaagcacacctgtgccatttctgggactctgattgatccagctgtggacattggaaggcgaaggaagggaggtggctcctgggtcatctttcacaaggctcaagacttcaacctgcagatgtatctttttccctccagtttttcctctagttcttttaggcatttaaattgtttctgttactctgtgcaaaataactttgagattggacaagaagatgttactaaagagaagttcctttaaaaggtcttgttcttgtgtcaaaaagctgcaagtttggtttgttctcgtgtgtgatcatgagtgcacaatgaagaagaccctagatgctgcattttttagctctgaagattccttaggtatccctgaagacagctcgctcagatgatcagcatttagagtgaaaacaagggcccttcatgggtgaacattagaaagagccagggttcaaagctggcgaatggatgacgcaccctagccactggcccctctctgtttcatgtatttccaaaagttgtaaactttgatggctgatttttcgtaagtcaggtttctaagtgagctccctgaggtgccaaggccatggtgtccgccctgctgcgtctgttcgtcagctgagttccttgtgaatctctgttttagggtttggggctagtgtgtttgtgtttccattctaagattgagtctggcagtccctgtttttttgcattggggtaactgctctttgattttttttaattgcagtatttgtgtgattgcaataataaagtttggtttggtttttacagtcatgcgcagggacgatccttgttctctgctgtaaactgtaaaaagtttatggagacttaaagtcttgatgttgtgaagcagaggttattttgtggaaagattaaaaggattttgttggtacctggttttgtgttgtgtatatatacatgaggttgaacagtgaaaggaaagttcagtagtgatgttagaagggtaactatgacaaagatacttttgagataacatttaaaagtactttatattttacataatagcatgtttcattttgattaaaagctaccaaaggaattttgatcatggcataagtgtttaaagcaatattttctggaatataccaagtttatataatttgattttgtgctaaattattaagagtctctttttgaaacatgcgggtttgaaatatgacaccttgtgggtttccatattaaaatcctcactctttaattgtcatttctatctttgaaaattttcatttatgagttccatgatatgtggtctaagaaagaccaaacagatttctatttttttttcttataagttcgttgtgtctagagattgttaatattgtaatttaatgtagacttactttgaataaaattagtttaattggccttaaaattacattaataaaactttgtgatatgcaaatgat

SEQ ID NO: 91 - DNA, 3810 bp, Homo sapiens
  misc_feature: Incyte ID No: 331793.11
  unsure 90: a, t, c, g, or other
gttcgccgccgccgcgccggccacctggagtttcttcagactccagatttccctgtcaaccacgaggagtccagagaggaaacgcggagngaggacaacagtacctgacgcctctttcagcccgggatcgccccagcagggatgggcgacaagatctggctgcccttccccgtgctccttctggccgctctgcctccggtgctgctgcctggggcggccggcttcacaccttccctcgatagcgacttcacctttacccttcccgccggccagaaggagtgcttctaccagcccatgcccctgaaggcctcgctggagatcgagtaccaagttttagatggagcaggattagatattgatttccatcttgcctctccagaaggcaaaaccttagtttttgaacaaagaaaatcagatggagttcacactgtagagactgaagttggtgattacatgttctgctttgacaatacattcagcaccatttctgagaaggtgattttctttgaattaatcctggataatatgggagaacaggcacaagaacaagaagattggaagaaatatattactggcacagatatattggatatgaaactggaagacatcctggaatccatcaacagcatcaagtccagactaagcaaaagtgggcacatacaaattctgcttagagcatttgaagctcgtgatcgaaacatacaagaaagcaactttgatagagtcaatttctggtctatggttaatttagtggtcatggtggtggtgtcagccattcaagtttatatgctgaagagtctgtttgaagataagaggaaaagtagaacttaaaactccaaactagagtacgtaacattgaaaaatgaggcataaaaatgcaataaactgttacagtcaagaccattaatggtcttctccaaaatattttgagatataaaagtaggaaacaggtataattttaatgtgaaaattaagtcttcactttctgtgcaagtaatcctgctgatccagttgtacttaagtgtgtaacaggaatattttgcagaatataggtttaactgaatgaagccatattaataactgcattttcctaactttgaaaaattttgcaaatgtcttaggtgatttaaataaatgagtattgggcctaattgcaacaccagtctgtttttaacaggttctattacccagaacttttttgtaaatgcggcagttacaaattaactgtggaagttttcagttttaagttataaatcacctgagaattacctaatgatggattgaataaatctttagactacaaaagcccaacttttctctatttacatatgcatctctcctataatgtaaatagaataatagctttgaaatacaattaggtttttgagatttttataaccaaatacatttcagtgtaacatattagcagaaagcattagtctttgtactttgcttacattcccaaaagctgacattttcacgattcttaaaaacacaaagttacacttactaaaattaggacatgttttctctttgaaatgaagaatatagtttaaaagcttcctcctccatagggacacattttctctaacccttaactaaagtgtaggattttaaaattaaatgtgaggtaaaataagtttatttttaatagtatctgtcaagttaatatctgtcaacagttaataatcatgttatgttaattttaacatgattgctgacttggataattcattattaccagcagttatgaaggaaatattgctaaaatgatctgggcctaccataaataaatatctccttttctgagctctaagaattatcagaaacaggaaagaatttagaaaaacttgagaaaacctaatccaaaataaaattcacttaagtagaactataaataaatatctagaatctgactggctcatcatgacatcctactcataacataaatcaaaggagatgattaatttccagttagctggaagaaactttggctgtaggtttttattttctacaagaattctggtttgaattatttttgtaagcaggtacattttataaaatgtaagccctactgtaaggtttagcactgggtgtacatatttattaaaaatttttattataacaacttttattaaaatggcctttctgaacactttatttattgatgttgaagtaaggattagaaacatagactcccaagttttaaacacctaaatgtgaataacccatatatacaacaaagtttctgccatctagctttttgaagtctatgggggtcttactcaagtactagtaatttaacttcatcatgaatgaactataatttttaagttatgcccatttataacgttgtttatgactacattgtgagttagaaacaaacttaaaatttggggtatagaacccctcaacaggttagtaatgctggaattcttgatgagcaataatgataaccagagagtgatttcatttacactcatagtagtataaaaagagatacatttccctcttaggcccctgggagaagagcagcttagatttccctactggcaaggtttttaaaaatgaggtaaatgccgtatatgatcaattaccttaattggccaagaaaatgcttcaggtgtctaggggtatcctctgcaacacttgcagaacaaaggtcaataagatccttgcctatgaatacccctcccttttgcgctgttaaatttgcaatgagaagcaaatttacagtaccataactaataaagcagggtacagatataaactactgcatcttttctataaaactgtgattaagaattctacctctcctgtatggctgttactgtactgtactctctgactccttacctaacaatgaatttgttacataatcttctacatgtatgatttgtgccactgatcttaaacctatgattcagtaacttcttaccatataaaaacgataattgctttatttggaaaagaatttaggaatactaaggacaattatttttatagacaaagtaaaaagacagatatttaagaggcataaccaaaaaagcaaaacttgtaaacagagtaaaaatctttaatatttctaaagacatactgtttatctgcttcatatgctttttttaatttcactattccatttctaaattaaagttatgctaaattgagtaagctgtttatcacttaacagctcattttgtctttttcaatatacaaattttaaaaatactacaatatttaactaaggcccaaccgatttccataatgtagcagttaccgtgttcacctcacactaaggcctagagtttgctctgatatgcatttggatgattaatgttatgctgttctttcatgtgaatgtcaagacatggagggtgtttgtaattttatggtaaaattaatccttcttacacataatggtgtcttaaaattgacaaaaaatgagcacttacaattgtatgtctcctcaaatgaaaattctttatctgaaattttaaaagacattgattccgcatgtaaggatttttcatctgaagtacaataatgcacaatcagtgttgctcaaactgctttatacttataaacagccatcttaaataagcaacgtattgtgagtactgatatgtatataataaaaattatcaaagaaaattacctgccagtcatttgtaaatgctgtctactcctgaaagccttccttcatctctatttagttaataatgtgctctctcctcctgttttgaaaccccatagctctctacacctcttattgtacatcactctactttgcattggagttctgtttctata

SEQ ID NO: 92 - DNA, 730 bp, Homo sapiens
  misc_feature: Incyte ID No: 902895.2
gagatggagtggcagttttgtttttttgttttttgacacagagtttcgcccttgttgcactccggcctaggtgacagagggaaactccatctccaggaaaaaaaaaaaaaaacccaatttggataccaaattaatcaactaatttgagctatctggccttactcttagtagtttttagtacgtgctggacaccacttttaaaaagcaatcactgtgctagaaaagtatattggctttgttaggattaaagttcattaacttcaatgtaatcatgcctcctattactgaagtcagattggaaccactaaagatccaaactttctgtctggtaatagaaagtaaaaatctagacatcatttacatttgagaaagctgtttttaacattattttaaaatgccaaatatgttctttctagaaaaatatttatttttgtttttgttggatagcttttaattacatttcagagaggtgtaattttgggtagatgctcattacatttttgaaaggtttatgattccaaaataaagatttatatgactggtgatactggctttacagaaatttcagagaactaatttttaaaatctttagcatttaaaactttttttgttttgttttctgacatattctgacaaagagcagcaaaccactgctgtgtggcattcttggagtgtgctgtgaatgtgctttttaagaaattaaaaagagatcattttaaaattgaaaaaa

SEQ ID NO: 93 - DNA, 604 bp, Homo sapiens
  misc_feature: Incyte ID No: 007273.1
cccttacccctttctttgaagaaagggtgtcaaaagacattacctgcctctaaagccagatatcaccagcagacttcttaaagtggacataatcctagagctttcattctgtttagaagttcatgttcatcttagccatttggaacttcttcattctctatcttttctccacggtggctgggcttgtctgcaaatcattgtgtcaaaatcaaactattttcaaaacagccctttgcttctgagcccctcccctaagtcctctgtgggggtccatgattctgcagaggtatgggacagaatcttcagattttaccccttgagtctcttcctagtcatatcctggttccctcattctaatattgacaaaggatgactcattaagtgcaactggttatgtaactttcaaatactttcattgtgtatgtcaggatctgaggaacaaaatgatgtcatttaatcggaatctaaatgtgacacaaacaacgtgccagcaatacctgcttgtgaaataatgttctgagcccacagtgttcctgggtatgtgagtttatatcaagtgaaaaggctgcttaattgacattaaagttttggaatgtaaagcttc

SEQ ID NO: 94 - DNA, 2575 bp, Homo sapiens
  misc_feature: Incyte ID No: 190771.2
gcctctcctatgactccagatggacagtgggcagcccgaaagaggaagctggcagccaaggcatacatgcccctgcgggcaaagcggtgggcagctgagctggatggacgctgcccctcggacagcagtgcagagggggcttcagtccccgagcggccagacgaaggcattgacagccacacatttgagagcatcagtgaagatgactcatccctgtcccacctcaagtcatctatcaccaactactttggtgcagctgggcggttggcctgtggggagaagtaccaggtgttggctcggagggtcacacctgagggcaaggttcagtacctggtggagtgggaagggaccaccccttactgactagcccccgggggtgccaggggtcctgaaaaccaaaggaggagcagcagaagccataggctccccagctttctccaggctggggtgggagaaggaagcaggacagagctgcaagtgcctggcagaatgccctgcctgcctgcctgccaggccaaggcctgcgtctctctgctgtaccagctctgttccagggcctcctcaggctcgttacccctgtgcctgtgtctctacacactccacaccccctcaaactctgtttatctgttctctgaccttgtgtcccctgcgctgggacccttcctcctgaggcccaggtctttgtccccagttgtgtgccttgacctctctcgcccctttctgggtgtgttcgcacatcctgtgtgtgcacagctgtccctccactggatccccttcacacgtgacccgtggggcagccagtcctcccagggactacataacaggcacctttgagagagcatgggagaaggtggataagaggatgctgctcagtgcttttctcttccactttcctgccactccccactaccctcggagagaggtggtgggatgggagagagcccctgtgaaagcctgtgaggatctgaagagtaaagggctgggtctgcctcagaaggcaccagcaccagggcccaggtattaaggctgagagtgaaggctgccaatgtcagctttggaggtcccagaagtcttctgttctctggcctcaccccctcagtcgccatagagctgggcctggccttgctggaatggaggcatccttccaaacctgggggacgggggtggggggtggtagtggtgggagggaaaccatgtcttgctaaacctgtttctggtgcctcccatccccagacccaccagacaccacacagcagacaatacacacccactcgcacaagcttccatccacatgtgttgtactttcagctctaggcatgcagacaaccccacacggccacaccaccacatgcccaagtgtacacacacagagccacaccgtccctctgggcctgctggctcctcccttggctttcccttggcccacttccagggcccaggtgctgcaactaaatgtgaaagctcagtggccgctccttctttcagcccatcaaccagcattggtcccatagggaagcacaggggactcaccctctttcatatcccttgccctgccctgaaatggacaatcactttttgggataggttgaaatttttaaagagcctgcatcatttggttccctcaaagggaagcccttgccagtgggggtttgaaagagaatttttggaaccaacattcaaattctgcctcatctggagggaaaccaaaattgggagggggaagaggacccctgatgttttgctgcttccagagatattagaaactgactcacttgattggaaaatggacaaaagtgccttgacgtggagggtgggcaccagatggggaccagccttgccaactgctgctgtggcctccagcttggctggttttgcaggccgccagcaggaaggcgaaggtggtagtacagcaagaggcactggcggggcagcaggcctgcaggagctgtttttccattgctaggcctgacccctctctacctgtgagcgttcagggggtccctgagatagtttagatgcccccccatcttagacctcagctcccacagtgccttttaagggggacctcacctcctgtgcacagcccacccactttcctctgcttccctggcacagcccaggcatagacgagctggcgttggacccagttcttcccccttttcagccccacagctgctgccacaggggccaactagggccaggtggaaggggagctgagaagccaacccctagcccaggggtgctgtgggaactgggatccaatttgtagcttcctgcctggcttcagagagcccagcaaccttctaggcctgctttccagacttctgagatagcctgggatgagcaatcctgttacagtacatctggaccttccctacctgggctctggggaggctgtgggcctggagagggaaaaggagggagggggtgtctgcaccacctgggaagatagcacaaggcctaatgaggtcaccctgactccccaccccagcatttcattcataccagataatagctgcattactgccaactgaccttataaccctctgcaccttcaaaaagattcatggttttt

SEQ ID NO: 95 - DNA, 2366 bp, Homo sapiens
  misc_feature: Incyte ID No: 1095702.14
  unsure 1982, 2040, 2043, 2076, 2112, 2128, 2137, 2141, 2155, 2157, 2182, 2205,2212, 2215, 2228, 2252, 2330, 2355, 2363: a, t, c, g, or other
ggggaaaggggcgaaatggttctatggtcacatgccgcggggtctggtgggaggagcggttgcccagcggcctcttggcgcttcctgtttccggttcccagagtggggcacagcgaggcgctagggggaacgctggcctctgaaactagctctgggaccggggtctgcggccggcccctagctggccccgtctcccatccccagaagggtattcactggggattctgagctttggctactccagtttcccacgacacgatgttccctttctacagctgctggaggactggactgctactactactcctggctgtggcagtgagagaatcctggcagacagaagaaaaaacttgcgacttggtaggagaaaagggtaaagagtcagagaaagagttggctctagtgaagaggctgaaaccactgtttaataaaagctttgagagcactgtgggccagggttcagacacatacatctacatcttcagggtgtgccgggaagctggcaaccacacttctggggcaggcctggtgcaaatcaacaaaagtaatgggaaggagacagtggtagggagactcaacgagactcacatcttcaacggaagtaattggatcatgctgatctataaagggggtgatgaatatgacaaccactgtggcaaggagcagcgtcgtgcagtggtgatgatctcctgcaatcgacacaccctagcggacaattttaaccctgtgtctgaggagcgtggcaaagtccaagattgtttctacctctttgagatggatagcagcctggcctgttcaccagagatctcccacctcagtgtgggttccatcttacttgtcacgtttgcatcactggttgctgtttatgttgttggggggttcctataccagcgactggtagtgggagccaaaggaatggagcagtttccccacttagccttctggcaggatcttggcaacctggtagcaaaagggaacggaagcagaagtgggacatcgagggctctgctgtcctctgcgctgggtgtggaatgctgctgcacctgtcccttctgctggctcagggaagtgtcttcttgcccacatttctgtggggaaaggtttttaatcctctgatgcttccatcttcctgtttaggccatgtgcccagaaacctggactgatctttctttaatagtgaacccctgggccactgaagagtaacatggctccactggacacaaaagagggatggaatcaacaggcagggggccttttataagccttaggaaaagaaaatgaaactatttcatctttggacttttcaatactattggagtgattttttttctttctaaacagggaaaataatgttacaaaagcatcttttttgttatttgtttgcatccctcccccacaccctggtgttttaaaatgaagaaaaaaaaccatcactttttgtacaaaaactcttaatgattaaaaaacaaacaaaacatattggccttgtcatttgtgtgaaagtgggcaaagactggaatagagtaagacaactgaaaccaattttcatccttttactgaggaaaaaaatatttaatatttttgttatataaggaatagtgcctaaggcaggtacttatactcctgacctcagccccacacactctggttttataaagctataggacagagcagagatggaactgaaaaacagggtagaaaataacataaattggaggggaacagtgggatgcagaaagaatgacaacagccacatgtgccccagtcaaatacttttagtccctgcagcagaagatgccaaccaagtctctatactggctggggatcctgccatggatgcaggagaaaaaattcaatcacaagggagtaagtgacaacaaaaagaaaaaactctgagccacagctacactgggaggggggaggaccagattttgctacttctgtcacacaggctagaaaaaccctacctttcccattggggnaggcaacctgaaattccacccggttcctggccttaccatactgtgtattccgcctttnggngatttaggccgggggataaaatgctccacttcngggttagggttgggcagccctagtttttgaggcctncctttttaaaaaaggnttggattangggncggagaaatggggngnccttgtaaaggtttttaaaaaaatnaaggtggccccccgggggaattntaaaagnttnccgccattgtggnaccaggaaacccattttttgcaantttttttccctgtttaggtatccctacagggggttaatggtttggacaattttttttcctgaaaggttttttggaccngggtttacctgggaagtggggggtntttctggnctt

SEQ ID NO: 96 - DNA, 6525 bp, Homo sapiens
  misc_feature: Incyte ID No: 1095702.4c
  unsure 1418-1446: a, t, c, g, or other
ggccgagcgagcccccagcccagcctggcgactggggaccccggcacatgaggtggacgcccccggggaagacttgggtgcacagccaggcgagaaggtcttgagtcagacagagcaccagccttgggggaccctggaccactatcatggagactgagagcgagcagaactccaattccaccaatgggagttctagctcagggggcagctctcggccccagatagctcaaatgtcactatatgaacgacaagcagtgcaggctctgcaagcactgcagcggcagcccaatgcagctcagtatttccaccagttcatgctccagcagcagctcagtaatgcccagctgcatagcctggctgccgtccagcaggccacaattgctgccagtcggcaggccagctccccaaacaccagcactacacagcagcagactaccaccacccaggcctcgatcaatctggccaccacatcggccgcccagctcatcagccgatcccagagtgtgagctctcctagtgctaccaccttgacccaatctgtgctactggggaacaccacctccccacccctcaaccagtctcaggcccagatgtatctacggccacagctgggaaacctattgcaggtaaaccgaacccctgggtcgaatgtgcctctagcctcccaactcatcctgatgcctaatggggcggtggctgcagtccagcaggaggtgccatctgctcagtctcctggagttcatgcagatgcagatcaggttcagaacttggcagtaaggaatcaacaggcctcagctcaaggacctcagatgcaaggctccactcagaaggccattcctccaggagcctcccctgtctctagcctctcccaggcctctagccaggccctagcggtggcacaggcttcctctggggccacaaaccagtccctcaaccttagtcaagctggtggaggcagtgggaatagcatcccagggtccatgggtccaggtggaggtgggcaggcacatggtggtttgggtcagttgccttcctcaggaatgggtggtgggagctgtcccaggaagggtacaggagtggtgcagcccttgcctgcagcccaaacagtgactgtgagccagggcagccagacagaggcagaaagtgcagcagccaagaaggcagaagcagatgggagtggccagcagaatgtgggcatgaacctgacacggacagccacacctgcgcccagccagacacttattagctcagccacctacacacagatccagccccattcactgattcagcaacagcaacagatccacctccagcagaaacaggtggtgatccagcagcagattgccatccaccaccagcagcagttccagcaccggcagtcccagctccttcacacagctacacacctccagttggcnnnnnnnnnnnnnnnnnnnnnnnnnnnnnagcagcaacagcagcagccgcaagccaccaccctcactgcccctcagccaccacaggtcccacctactcagcaggtcccaccttcccagtcccagcagcaagcccaaaccctggtcgttcagcccatgcttcagtcttcacccttgtctcttccacctgatgcagcccctaagccaccaattcccatccaatccaaaccacctgtagcacctatcaagccgcctcagttaggggccgctaagatgtcagctgcccagcaaccaccaccccatatccctgtgcaagttgtaggcactcgacagccaggtacagcccaggcacaggctttggggttggcacagctggcagctgctgtacctacttcccgggggatgccaggtacagtgcagtctggtcaggcccatttggcctcctcgccaccttcatcccaggctcctggtgcactgcaggagtgccctcccacattggcccctgggatgacccttgctcctgtgcaggggacagcacatgtggtaaagggtggggctaccacctcctcacctgttgtagcccaggtccctgctgccttctatatgcagtctgtgcacttgccgggtaaaccccagacattggctgtcaaacgcaaggctgactctgaggaggagagagatgatgtctccacattgggttcaatgcttcctgccaaggcatctccagtagcagaaagcccaaaagtcatggacgagaagagcagtcttggagaaaaagctgaatcagtggctaatgtgaatgctaatactccaagcagtgaactagtagccttgacccccgccccttcagtaccgcctcctacactagccatggtgtctagacaaatgggtgactcaaaacccccacaggccatcgtgaagccccagattctcacccacatcattgaaggctttgttatccaggaaggagcagaacctttcccggtgggttgttctcagttactgaaggagtctgagaagccactacagactggccttccgacagggctgactgagaatcagtcaggtggccctttgggagtggacagcccatctgctgagttagataagaaggcgaatctcctgaagtgcgagtactgtgggaagtacgcccccgcagagcagtttcgtggctctaagaggttctgctccatgacttgcgctaagaggtacaatgtgagctgtagccatcagttccggctgaagaggaaaaaaatgaaagagtttcaagaagccaactatgctcgcgttcgcaggcgtggaccccgccgcagctcctctgacattgcccgtgccaagattcagggcaagtgccaccggggtcaagaagactctagccggggttcagataattccagttatgatgaagcactctctccaacatctcctgggcctttatcagtaagagctgggcatggagaacgtgacctggggaatcccaatacagctccacctacaccggaattacatggcatcaaccctgtgttcctgtccagtaatcccagccgttggagtgtagaggaggtgtacgagtttattgcttctctccaaggctgccaagagattgcagaggaatttcgctcacaggagattgatggacaggcccttttattacttaaagaagaacatcttatgagtgccatgaacatcaagctgggccctgccctcaagatctgcgccaagataaatgtcctcaaggagacctaaggtggccctcttgcacaaaccagcctaaggcagacactctccactgtccaggttataacctggtaccagcagactttgcagggaagaaagagttgttccaatcatgtaaccttctgtaggggattactgagacagggaagagaagtgcaagaattggttgctggtgctacatggcggcagctttgacattttctctgggttctactttattttttaaaatctttacagttctcaccatttcacgtaccttaatccaatctttataaaagaggcagtctagagaactaggactgctcagccttatcctggagtggagcatttagcccaggtcttaattctccaagaggaggaatacatagtatggtaaggcaaggaactgggtggaatgtcaggttgcctgcccaatgggagaggtagggtttttctagcttgtgtgacagaagtagcaaaatctggtcctcccccctcccagtgtagctgtggctcagagttttttctttttgttgtcacttactcccttgtgattgaattttttctcctgcatccatggcaggatccccagccagtatagagacttggttggcatcttctgctgcagggactaaaagtatttgactggggcacatgtggctgttgtcattctttctgcatcccactgttcccctccaatttatgttattttctaccctgtttttcagttccatctctgctctgtcctatagctttataaaaccagagtgtgtggggctgaggtcaggagtataagtacctgccttaggcactattccttatataacaaaaatattaaatatttttttcctcagtaaaaggatgaaaattggtttcagttgtcttactctattccagtctttgcccactttcacacaaatgacaaggccaatatgttttgtttgttttttaatcattaagagtttttgtacaaaaggtgatggttttttttcttcattttaaaacaccagggtgtgggggagggatgcaaacaaataacaaaaaagatgcttttgtaacattattttccctgtttagaaagaaaaaaatcactccaatagtattgaaaagtccaaagatgaaatagtttcattttcttttcctaaggcttataaaaggccccctgcctgttgattccatccctcttttgtgtccagtggagccatgttactcttcagtggcccaggggttcactattaaagaaagatcagtccaggtttctgggcacatggcctaaacaggaagatggaagcatcagaggattaaaaacctttccccacagaaatgtgggcaagaagacacttccctgagccagcagaagggacaggtgcagcagcattccacacccagcgcagaggacagcagagccctcgatgtcccacttctgcttccgttccctttctagaagattgaaaaaaaggtcaaaaccacatgcctgtggagaaagtgcgacatgtttagaaatactggtagggaaccaggagtaagaaaagctttaccagcttttactacaaatggatgaaagacatcaggatcccaccaccgcaaggtaaagtgacttcccttttctggaacccctgtggcacaggagtaccaattttcctttccaacgaactggatttctggataggcattttggctgtatgtggacagataagaccacagtccttagcccaatcccagctatacagtcaccccaatttccacaaatgatgtgatggtaccgtataatcctgtaattgggaaatttcacatttttcctgtcctaatctcagaggtgggagaagcaagtctagaacatctccaggctcagactaaacgagagtacttggactgcaaccaagtaatcactgcaaagtagttccaagcagcaagaaataccagattctcatggaggctactatagggtacagaataacaacatgaaagcaatcaaccctgtataaataatgtttcttggcattttttttttaattaaagaaatccagtgtctcaaaaacttgtgaaaatgtgtttaaaaaacaaacggccagtgagcctgctacaccattttgcccatatgcctattgtaacttctgatgtcaagagacaatgcaaaagcctctgttttcacaggccctattatattaactctgacttacaactgtacctctctagagaaaaaacagaaaataaggaacaaagggaaggcagttttactagtgagaagatgcaaatcaaaagcaaactggaaagcaagagcaatagtaagggtgagatgagggactggagttgagactgcttgagaaatctggctgtgtagctttggtttgggggactgaggaagaggctggacatataaagtgcaatctacattggtaataaatggtcatccctttcttctgactcctcccccagctggtcatcccccacaccacgatatgctgcaggcacatttcgaggtttagaacggcagacaaagtcacagccatctgctaccaggttgccaagatcctgccagaaggctaagtggggaaactgctccattcctttggctcccactaccagtcgctggtataggaaccccccaacaacataaacagcaaccagtgatgcaaacgtgacaagtaagatggaacccacactgaggtgggagatctctggtgaacaggccaggctgctatccatctcaaagaggtagaaacaatcttggactttgccacgctcctcagacacagggttaaaattgtccgctagggtgtgtcgattgcaggagatcatcaccactgcacgacgctgctccttgccacagtggttgtcatattcatcaccccctttatagatcagcatgatccaattacttccgttgaagatgtgagtctcgttgagtctccctaccactgtctccttcccattacttttgttgatttgcaccaggcctgccccagaagtgtggttgccagcttcccggcacaccctgaagatgtagatgtatgtgtctgaaccctggcccacagtgctctcaaagcttttattaaacagtggtttcagcctcttcactagagccaactctttctctgactctttacccttttctcctaccaagtcgcaagttttttcttctgtctgccaggattctctcactgccacagccaggagtagtagtagtagcagtccagtcctccagcagctgtagaaagggaacaacatcgtgtcgtgggaaactggagtagccaaagctcagaatccccagtgaatacccttctggggatgggagacggggccagctaggggccggccgcagaccccggtcccagagctagtttcagaggccagcgttccccctagcgcctcgctgtgccccactctgggaacc

SEQ ID NO: 97 - DNA, 1696 bp, Homo sapiens
  misc_feature: Incyte ID No: 977667.1
gagccccagagagaaagacggtcatttcctccctgcatcttcccttggggctttaaaaaccacagcccttgggcaggagggaccttcgatcctcggggagcccaggagaccagaacatgaactccttcaattataccacccctgattatgggcactatgatgacaaggataccctggacctcaacacccctgtggataaaacttctaacacgctgcgtgttccagacatcctggccttggtcatctttgcagtcgtcttcctggtgggagtgctgggcaatgccctggtggtctgggtgacggcattcgaggccaagcggaccatcaatgccatctggttcctcaacttggcggtagccgacttcctctcctgcctggcgctgcccatcttgttcacgtccattgtacagcatcaccactggccctttggcggggccgcctgcagcatcctgccctccctcatcctgctcaacatgtacgccagcatcctgctcctggccaccatcagcgccgaccgctttctgctggtgtttaaacccatctggtgccagaacttccgaggggccggcttggcctggatcgcctgtgccgtggcttggggtttagccctgctgctgaccataccctccttcctgtaccgggtggtccgggaggagtactttccaccaaaggtgttgtgtggcgtggactacagccacgacaaacggcgggagcgagccgtggccatcgtccggctggtcctgggcttcctgtggcctctactcacgctcacgatttgttacactttcatcctgctccggacgtggagccgcagggccacgcggtccaccaagacactcaaggtggtggtggcaatggtggccagtttctttatcttctggttgccctaccaggtgacggggataatgatgtccttcctggagccatcgtcacccaccttcctgctgctgaataagctggactccctgtgtgtctcctttgcctacatcaactgctgcatcaaccccatcatctacgtggtggccggccagggcttccagggccgactgcggaaatccctccccagcctcctccggaacgtgttgactgaagagtccgtggttagggagagcaagtcattcacgcgctccacagtggacactatggcccagaagacccaggcagtgtaggcgacagcctcatgggccactgtggcccgatgtccccttccttcccggccattctccctcttgttttcacttcacttttcgtgggatggtgttaccttagctaactaactctcctccatgttgcctgtctttcccagacttgtccctccttttccagcgggactcttctcatccttcctcatttgcaaggtgaacacttccttctagggagcaccctcccaccccccacccccccacacacaccatctttccatcccaggcttttgaaaaacaaacagaaacccgtgtatctgggatatttccatatggcaataggtgtgaacagggaactcagaatacagacaagtagaaagattctcgcttaaaaaaatgtatttattttatggcaagttggaaaatatgtaactggaatctcaaaagttctttgggacaaaacagaagtccatggagttatctaagctcttgtaagtgagttaatttaaaaaagaaaattaggctgagagcagtggctcacgcctgtaacccag

SEQ ID NO: 98 - DNA, 4577 bp, Homo sapiens
  misc_feature: Incyte ID No: 253534.14
  unsure 447-553, 849-884, 949-997, 2279-2313, 2590-2886: a, t, c, g, or other
aatccctggatatttttagtttaccagttagatttgatttgataccactttttcttgccatttatattttcagaaaatttagaatggtattgtgtttagaaaaatgtgcaagattatttttgtaaaataatttagagggttttttttcctgctataggccataaaattttgagtagaaaaatccagaaatttgaaaatcagtatcgtggtagagagctgccaggctttgtgaattacaggacatttgagacaatcgtgaaacagcaaatcaaggcactggaagagccggctgtggatatgctacacaccgtgacgggtgagtgctcagtttcacctctgagcattgatttctaaagaaaggaaaggttcgaaccaaagccagcaccaaacttcagcactttcctcctggggtgcatcccacaccaacgagcaaacctctcattctcnnnnnnnnnnnnnnnnnnnnnnnnnnnnnnnnnnnnnnnnnnnnnnnnnnnnnnnnnnnnnnnnnnnnnnnnnnnnnnnnnnnnnnnnnnnnnnnnnnnnnnnnnnnactacaaatgccggtcacaagtcccagacctcctattcttctgatggactgtttataaatcaaggttcttgcgacccattcctcaggtcaaccaagaactctggaacacacttcactgacatttactggtctattagaaaggatttgataaggggcacaaatgaagctgttggagaggcacatagtgggggcctgaacacagaagcttctgtccccacggggttgggggcaccaccctcatggcacagagatgtggtcatcaaccagggagcccttggaacctcaccacggagaannnnnnnnnnnnnnnnnnnnnnnnnnnnnnnnnnnnggattgactcaatctccaggccctccctcctctgtggagctggaagttctaagtttctagccaannnnnnnnnnnnnnnnnnnnnnnnnnnnnnnnnnnnnnnnnnnnnnnnnccaccaggcatcatctcttcaaaacacgagatactcctaaggctggacattccaagagatgtaggggctctatgttaggaaatggggacaaagacaaaatatttatatttttcctatcacaccacacctcccatctgctccactgctatgctggcttcacactcaaaatcggctgtttatttgaaatctccgaggagtaaagccaatggttccataactgcacgtgtagatgtgtttggagccttttggagtgctgtaggaatctaggtgtgtcacggataggtaggaaactagatcctactgtggatccactcccttcttgaaatgctttgctttcttggttttccaggtattaaatctctattcttcatcctctccttgactgacagtatccttactcacacttcagctgcctcatcttagcagtaattaataatcactcatggatccatgaactaaggagctggagatagcctcagaacagctcattcagaggtgtatttccagtaaaattgaccttttagccctaataatcatataccaaaacctgcaatcatgttgttttggtccattgtagactcttaactcattccagaggaaagtttataatacttagagccttatagtcataaaaatcaacatagatatacctatttctttttcagaaatgtatgacatggagatcaataagaggttttcaatcataaagatactataccttgtattacaataaaattatgtgaggaagtagaatagaaatgagtttcaaaaataaaagataaataatataaattttttaaactaagagcttgttcttgtatttttttaaaatggataatgtagacactcaaattccattgatatatttaagagtgatttgacttatattaagagttgtattataaaatattaatatttataatttaaaagaaattacattctttgcagctatttaggataaaaagtttaaatatcaaataaatgtatgccaggggtcatttgcttttaagattcttccagcaaattattaagcaaaaagagcatgccttggctttttcatggtaaagagaagaagggagcagggagaggggaaactttacttcataccatttgatcctcatatttttttgcatcttaagaagagaacaaatgatcctaccaatattgaactatttttctctctttgattagatatggtccggcttgctttcacagatgtttcgataaaaaattttgaagagttttttaacctccacagaaccgccaaggtaaaaccaaccannnnnnnnnnnnnnnnnnnnnnnnnnnnnnnnnnngcttgacactagaaaatagatttcttggatgaggattatttcaactttattgtatacttttagaacagcaaataacatcactcactagtgcttcttctgatgttaccggtgatgtctggttaaaagcaataaaggagggagtgcttaaacgcacagaacaagagatccacagttagcggagaagattatcacatctaagggcaatggctccaaatccagaaactcactgaggaaactacatataaaaatagaatatttctggcccgagtgggcatgnnnnnnnnnnnnnnnnnnnnnnnnnnnnnnnnnnnnnnnnnnnnnnnnnnnnnnnnnnnnnnnnnnnnnnnnnnnnnnnnnnnnnnnnnnnnnnnnnnnnnnnnnnnnnnnnnnnnnnnnnnnnnnnnnnnnnnnnnnnnnnnnnnnnnnnnnnnnnnnnnnnnnnnnnnnnnnnnnnnnnnnnnnnnnnnnnnnnnnnnnnnnnnnnnnnnnnnnnnnnnnnnnnnnnnnnnnnnnnnnnnnnnnnnnnnnnnnnnnnnnnnnnnnnnnnnnnnnnnnnnnnnnnnnnnnnnnnnntttccatccagagtgaggaaagagcctacaggaaatgagcctgggggacagactgggccaagagaccagacttagccactcttagaaataggtgtccccggcacagatgaggagcctggccccatgattcaccagctggaggccttgggatgtgccacttccagcctgtgcccctgactcctcattcataaaagaagactgataaggccttcctcagaaggttgagatggacgtggagtaagatgtttaggatgcacctgccactgtgcactgtgcctctcctcaaggcctggagggtccaggggtgaagtttctcctcctcaggttttggcaaccagtttctctaaaccccgggaacataaaacataattttctgacttaaacatggctttcctgctcatccctgtggattatctgatggatatgacaatcctcgccatcagatatagaagcccctaaaagagaaaggaaagaagctgagttacggggcctgaaagcaagcctgtgcaggtccccaggccccgggatgggggtccggcccatctgtggctcaagcctcctgggaagctctgaccctcagccagggctagaaacctgccttagatacaccagggcgcggcccagagggctgttccaggaaacgtgctgtttcactcacgttgggtaacctggtatttacggacttcttacctactttcctgtgactcaggaatttgtgtcttgagggaaactgtatttatttattttttactgtagtccaaaattgaagacattagagcagaacaagagagagaaggtgagaagctgatccgcctccacttccagatggaacagattgtctactgccaggaccaggtatacaggggtgcattgcagaaggtcagagagaaggagctggaagaagaaaagaagaagaaatcctgggattttggggctttccagtccagctcggcaacagactcttccatggaggagatctttcagcacctgatggcctatcaccaggaggccagcaagcgcatctccagccacatccctttgatcatccagttcttcatgctccagacgtacggccagcagcttcagaaggccatgctgcagctcctgcaggacaaggacacctacagctggctcctgaaggagcggagcgacaccagcgacaagcggaagttcctgaaggagcggcttgcacggctgacgcaggctcggcgccggcttgcccagttccccggttaaccacgctctgtccagccccgtagacgtgcacgcacactgtctgcccccgttcccgggtagccactggactgacgacttgagtgctcagtagtcagactggatagtccgtctctgcttatccgttagccgtggtgatttagcaggaagctgtgagagcagtttggtttctagcatgaagacagagccccaccctcagatgcacatgagctggcggggatgaaggatgctgtcttcgtactgggaaagggattttcagccctcagaatcgctccaccttgcagctctccccttctctgtattcctagaaactgacacatgctgaacatcacagcttatttcctcatttttataatgtcccttcacaaacccagtgttttaggagcatgagtgccgtgtgtgtgcgtcctgtcggagccctgtctcctctctctgtaataaactcatttctagcagaa

SEQ ID NO: 99 - DNA, 783 bp, Homo sapiens
  misc_feature: Incyte ID No: 1136709.5
ctcactgctagtagtcagcacaataaaggatctaattgaggtagctcagtttctgaagctctgctcttaaccatgggccccattgttttgaaaaataaggggtcctgactgaggtagggtgggagcagggaggcctgagtctactgcttgatctctaactggctgcaccatgggaatctgttacaggaggggaggccacacctggccctgcctctctcacccactctcaatcccctggcaggtgccatacacagaggctgcctctttgtctactggttctactgtgacaatcaaagggcgaccacttgtctgtttcttgaatgaaccatatctgcaggtggatttccacactgagatgaaggaggaatcagacattgtcttccatttccaagtgtgctttggtcgtcgtgtggtcatgaacagccgtgagtatggggcctggaagcagcaggtggaatccaagaatatgccctttcaggatggccaagaatttgaactgagcatctcagtgctgccagataagtaccaggtaatggtcaatggccaatcctcttacacctttgaccatagaatcaagcctgaggctgtgaagatggtgcaagtgtggagagatatctccctgaccaaatttaatgtcagctatttaaagagataaccagacttcatgttgccaaggaatccctgtctctacgtgaacttgggattccaaagccagctaacagcatgatcttttctcacttcaatccttactcctgctcattaaaacttaatcaaacttcacag

SEQ ID NO: 100 - DNA, 578 bp, Homo sapiens
  misc_feature: Incyte ID No: 1136709.6
aggcagctcagagattcacacagaagtctggacacaattcagaagagccacccagaaggagacaacaatgtccctgctacccgtgccatacacagaggctgcctctttgtctactggttctactgtgacaatcaaagggcgaccacttgcctgtttcttgaatgaaccatatctgcaggtggatttccacactgagatgaaggaggaatcagacattgtcttccatttccaagtgtgctttggtcgtcgtgtggtcatgaacagccgtgagtatggggcctggaagcagcaggtggaatccaagaatatgccctttcaggatggccaagaatttgaactgagcatctcagtgctgccagataagtaccaggtaatggtcaatggccaatcctcttacacctttgaccatagaatcaagcctgaggctgtgaagatggtgcaagtgtggagagatatctccctgaccaaatttaatgtcagctatttaaagagataaccagacttcatgttgccaaggaatccctgtctctacgtgaacttgggattccaaagccagctaacagcatgatcttttctca

SEQ ID NO: 101 - DNA, 7149 bp, Homo sapiens
  misc_feature: Incyte ID No: 382293.16
cttatgaacagaaccaggacagggaggctggccggaggttcctgcagagggagccgtcaaggccctgtgctgctgtccctgggggccagaggggttgcccagcatgcccactggcaggagagagggaactgacccacttgctcctaccagcttctgaaggctccaaagtccggaggtgcagaaagccaggaccaagagacaggcagctcaccagggtggacaaatcgccagagatgtggtgcattgtcctgttttcacttttggcatgggtttatgctgagcctaccatgtatggggagatcctgtcccctaactatcctcaggcatatcccagtgaggtagagaaatcttgggacatagaagttcctgaagggtatgggattcacctctacttcacccatctggacattgagctgtcagagaactgtgcgtatgactcagtgcagataatctcaggagacactgaagaagggaggctctgtggacagaggagcagtaacaatccccactctccaattgtggaagagttccaagtcccatacaacaaactccaggtgatctttaagtcagacttttccaatgaagagcgttttacggggtttgctgcatactatgttgccacagacataaatgaatgcacagattttgtagatgtcccttgtagccacttctgcaacaatttcattggtggttacttctgctcctgccccccggaatatttcctccatgatgacatgaagaattgcggagttaattgcagtggggatgtattcactgcactgattggggagattgcaagtcccaattatcccaaaccatatccagagaactcaaggtgtgaataccagatccggttggagaaagggttccaagtggtggtgaccttgcggagagaagattttgatgtggaagcagctgactcagcgggaaactgccttgacagtttagtttttgttgcaggagatcggcaatttggtccttactgtggtcatggattccctgggcctctaaatattgaaaccaagagtaatgctcttgatatcatcttccaaactgatctaacagggcaaaaaaagggctggaaacttcgctatcatggagatccaatgccctgccctaaggaagacactcccaattctgtttgggagcctgcgaaggcaaaatatgtctttagagatgtggtgcagataacctgtctggatgggtttgaagttgtggagggacgtgttggtgcaacatctttctattcgacttgtcaaagcaatggaaagtggagtaattccaaactgaaatgtcaacctgtggactgtggcattcctgaatccattgagaatggtaaagttgaagacccagagagcactttgtttggttctgtcatccgctacacttgtgaggagccatattactacatggaaaatggaggaggtggggagtatcactgtgctggtaacgggagctgggtgaatgaggtgctgggcccggagctgccgaaatgtgttccagtctgtggagtccccagagaaccctttgaagaaaaacagaggataattggaggatccgatgcagatattaaaaacttcccctggcaagtcttctttgacaacccatgggctggtggagcgctcattaatgagtactgggtgctgacggctgctcatgttgtggagggaaacagggagccaacaatgtatgttgggtccacctcagtgcagacctcacggctggcaaaatccaagatgctcactcctgagcatgtgtttattcatccgggatggaagctgctggaagtcccagaaggacgaaccaattttgataatgacattgcactggtgcggctgaaagacccagtgaaaatgggacccaccgtctctcccatctgcctaccaggcacctcttccgactacaacctcatggatggggacctgggactgatctcaggctggggccgaacagagaagagagatcgtgctgttcgcctcaaggcggcaaggttacctgtagctcctttaagaaaatgcaaagaagtgaaagtggagaaacccacagcagatgcagaggcctatgttttcactcctaacatgatctgtgctggaggagagaagggcatggatagctgtaaaggggacagtggtggggcctttgctgtacaggatcccaatgacaagaccaaattctacgcagctggcctggtgtcctgggggccccagtgtgggacctatgggctctacacacgggtaaagaactatgttgactggataatgaagactatgcaggaaaatagcaccccccgtgaggactaatccagatacatcccaccagcctctccaagggtggtgaccaatgcattaccttctgttccttatgatattctcattatttcatcatgactgaaagaagacacgagcgaatgatttaaatagaacttgattgttgagacgccttgctagaggtagagtttgatcatagaattgtgctggtcatacatttgtggtctgactccttggggtcctttccccggagtacctattgtagataacactatgggtggggcactcctttcttgcactattccacagggataccttaattctttgtttcctctttacctgttcaaaattccatttacttgatcattctcagtatccactgtctatgtacaataaaggatgttttattggtctggcaactgcaaaatatacaaatttctgaaaggcatctcctgtttgaaagctagcatagctttatatcccaggtcattaattcagacaaatacacagaacacagagaagtcataagtcacacataggaggctcccaaaccaattaacaatgaaacccaatctctacagcttctacagctttctattgtttaggctccttatacatattaaataaataaatagcacatctgctatcaaaataataaaaaaataaatttcaagtattacaaagaaaaatatcattggtgtggttccaaacagtttttcttctctctcaaaatgaagagctttgcccgtggtctcaggacagaataaggaggggggaaactcacccaaaaacaaataggcaaagttaaaaatattggtccccgttattttgtggggtggagagttggaggaatcagtagacgccaaaagttcatgactgtagctcaaacccaacccccgcccccggcccccgtccaatgtcccctcaaaaggcaggtcactggcttgcaaagtaggcagtgttctcctttctatagtatctccctccctgtccagattcatgttacctctctccctatctaggcccttcgcaaactaaaagtcccgtgttagaccaaggcttctgtatttaggtattgattttaggtagtcagaggggagaggggaccacagctatcaagcccctatctgtatcaaacttcagagtcgatgttcaaagaatgaggcctgcgagggggacacgagaaactattctcaagagcaaagcaacaggccttccatgtcaaatcgaaaaatacaaccaagttaagcacaatcatgcacccgtgcacgtccaccccctacccacatattctgatgagactcaacatccagggggagagagaaaactgcgcgagcctggagctgcacgggaatgcggacagagacatcctctccagcagacgccagccaaagtgggtgcaacgggcggggagggcttgaatggttcagcatgaaaatcccccacttgattgtaccatacctgaagcacagcctcagttcctactcaattccaaccaggaaaaaaacatgcattctttaaaagctcttcccaaaaaacaaacagcaacggctcttctctccacgcccagtttcaggtgtctaaatctcccaccctcacccaggacctgtcccttgagctgggaggaggatctcagggctcacagcagaaggcaggaaagaaaagtgacctttggcacaagctttgagacatcctgaaaagggtcatttggacaaactctgctgccgagtttccaaatggtttcatctgggcacgagaccccccgtcccacctaccccagggtttgaggcaatgaggagaaaccaacaggctgagacgacaggtcccatgctttccatcaccacaaaagtgtcatagacgccatgaagggaaggccaggacaaagtccactcttccgaccttcccaaggcaccggcagagtgccaggcacaaggcagatgctccaagacagtgtgcaggcagctcttgaagaagtggctgcgagtgaggccttgcttgggccactgtccccacctgggaagagcagggacggtaatgcaagtgctggggaaggatgccaggtgttccgctccccaccttcagaggttccaagccccccagggcaagacaccccaacatctacgttcctgaagagaaggtgggactctcaggtcacacttctgccatcaaaaaagtgcaaaagccagcagctccaggaaagtgtttctcagttccccccaagtccaggtgggaggagagaggggccctggagctccctgggagcaggaggccccagttctcatatttcggcaaaatacttccctctccccgtgcagccagcctgcccttgcacatctttggaggcaggccacaggcctggaaggtgtgtggacctgcaggagagccagggtgtggaccacccagccaacttgcgtctcagctcagggacttcctgcagaagaggcctcaacccaacacctgtccaagttcgttcccatgaggcgtcttcccaggtcaagatgcaccaaacagtcacgtggaggttttacacattccttaactttcagcaactaggagcctgcctcctttaattttaggattctgccaccagtgtggtcttcccagctccaaacgtgccgggagatcacagaaacgaaacaaaacagcacagtgtccccagcggcctcttgtcaggaccagcactcatcaccctcccaaggctttgtgaaggtctccgaggctggacattcctaggaaacccagagggtggaggtgggggccccacggctaaaggcagggcgccagggacccacgtggctttctggtgtccagcggccgaggggacacagacggtgccaagcatggttctcttcggccaaggctcccccgctgctccaccccaccctctccggaagaagtcctcaggatacgttttgcctcgggcggagggcaggacacaagctaagctgcagaaatggaaatggaatggaaccgacacgtctgcctcagtgtttcctggaggagtcagcgctgctccgggagcctttcatgttagacaggcttgccctagcaaaggttgtccaggcagctgcgtgggcacctccgggggcaggcagctgggcagggcggccgaggtggaggccacatgctcctcaaagctgttgatgcgaggctttttggtgggttcggggctggctagcggggtgacactattgcgtctcatgagcgggttaggtcccttctttgcatcctctgacctctcccggtgtgtgcagacggactccacgttcaggtagatggattccacacggcagccataagcgacaggcgtcagtttcaggacggtgtgaagagggcatttcaggtagggcatctcctctgcactcttatccaggaagtaggcaagcaggcagcgcaggacggcctggtggcagatgaccagcacattctcctgccgctccagctccatgatcactggctccaagcgctggaccaggtcctggtaggactccccggtggggtagcggtaatagtacttgtcctgctcccgcagcgcatactcctcagggtaggtgtccctgatctcctcgtaggtcagctcctcacagacgcccgcgtcgatctcattgagcgccttccactgctcgtagggcagccgcagcgcctcggccgtctggatggtgctcttcagctggctggtccacacgcgcaggtccttcaggttctgctcctccacgaacttgctcagagcactggcaaacttcttgccccggctggacaggcctgagtcgcccccgatgcggccctggaggttgtgctcgttctcgccgtgccggcacaggtagatggtacgcggctgcacgtggatgttcatcaggtagtacacgatgcggctctggatgtggtcctgcacccggttcaccaggaacctccggcccacgtcaatcaccttgatcagcgacaagtccctgtcgcatttgtcggggtcgaggggctggtagctggcttcatagcaactgatcctcttcatgaagtcgtccatggcttctgccgagttgcagtctttgtaatccgggctggagattttaacttccatgatattggaggccacaactgtagggtcgtcgcacaccgactcgatgaaaaacgccttaaagtcattttctttggcaaaatgaaggatcatgtgtctcctctctctagtagtattggtggcatcgaaaaccgcaatttgtcccccttctttcgccaggtagcttttgacatctctcaaggcagctaaggcacattgcttccggactttcatggcttcctcattgtcggggcggaagaagttgtaggagctgtactgcttcacagcctcccggcgatactccccgacgttgaacacttttgtggggacgccaatccagttgaggtagcgagtcagcttcttggagatgtaggtcttgccccgggcggggaggcccaccatgacgatgacggtgggggagttggtcagctttggcccacaggatctgggcaacgagggcctgtggtccacgggcacccagatcttctgcactcggctctgcgtcagttccaacggcatcttcgcggctgcgcccgacggcccgcctcccggggccgagatcccgacgctggcaggagagcggccgccgacccccggaacaaaggaggagaggggggcgtgcgccggcgcgcggccgggcgtttcctgcgctgccaggggaaacgtgctttgggctaagttccggaccctcgcctgtgcggggctcgacgtgtgctgcgagggtagcgaggctggggatgccccggcacggccggctcgtccgctcggaaagctctgggatgctcgggcgcagtgacagccgcgctctcgccaccaggccctgccgctcgc

SEQ ID NO: 102 - DNA, 3145 bp, Homo sapiens
  misc_feature: Incyte ID No: 382293.15
  unsure 115, 3087, 3093, 3105, 3117, 3124, 3138: a, t, c, g, or other
gggctctctggcctgggaggaggacgctgtccttgtttcaaaagcagagggagctccaagatcaaggctgagtttccctaagtcatggtctcccagccccctctgtttagatcanggaatttcagacatgcacactcgggtagggaatcttatgaacagaaccaggacagggaggctgggccggaggttcctgcagagggagcgtcaaggccctgtgctgctgtccctgggggccagaggggttgcccagcatgcccactggcaggagagagggaactgacccacttgctcctaccagcttctgaaggtgacactgagccccaggtgacgccgcaccaccaaagaaggtgcttgtgtttgtcagacaaatacagccaggcctgccaccccttaggctccaaagtccggaggtgcagaaagccaggaccaagagacaggcagctcaccagggtggacaaatcgccagagatgtggtgcattgtcctgttttcacttttggcatgggtttatgctgagcctaccatgtatggggagatcctgtcccctaactatcctcaggcatatcccagtgaggtagagaaatcttgggacatagaagttcctgaagggtatgggattcacctctacttcacccatctggacattgagctgtcagagaactgtgcgtatgactcagtgcagataatctcaggagacactgaagaagggaggctctgtggacagaggagcagtaacaatccccactctccaattgtggaagagttccaagtcccatacaacaaactccaggtgatctttaagtcagacttttccaatgaagagcgttttacggggtttgctgcatactatgttgccacagacataaatgaatgcacagattttgtagatgtcccttgtagccacttctgcaacaatttcattggtggttacttctgctcctgccccccggaatatttcctccatgatgacatgaagaattgcggagttaattgcagtggggatgtattcactgcactgattggggagattgcaagtcccaattatcccaaaccatatccagagaactcaaggtgtgaataccagatccggttggagaaagggttccaagtggtggtgaccttgcggagagaagattttgatgtggaagcagctgactcagcgggaaactgccttgacagtttagtttttgttgcaggagatcggcaatttggtccttactgtggtcatggattccctgggcctctaaatattgaaaccaagagtaatgctcttgatatcatcttccaaactgatctaacagggcaaaaaaagggctggaaacttcgctatcatggagatccaatgccctgccctaaggaagacactcccaattctgtttgggagcctgcgaaggcaaaatatgtctttagagatgtggtgcagataacctgtctggatgggtttgaagttgtggagaaataagtggtgatgtttattattctccagggacgtgttggtgcaacatctttctattcgacttgtcaaagcaatggaaagtggagtaattccaaactgaaatgtcaacctgtggactgtggcattcctgaatccattgagaatggtaaagttgaagacccagagagcactttgtttggttctgtcatccgctacacttgtgaggagccatattactacatggaaaatggaggaggtggggagtatcactgtgctggtaacgggagctgggtgaatgaggtgctgggcccggagctgccgaaatgtgttccagtctgtggagtccccagagaaccctttgaagaaaaacagaggataattggaggatccgatgcagatattaaaaacttcccctggcaagtcttctttgacaacccatgggctggtggagcgctcattaatgagtactgggtgctgacggctgctcatgttgtggagggaaacagggagccaacaatgtatgttgggtccacctcagtgcagacctcacggctggcaaaatccaagatgctcactcctgagcatgtgtttattcatccgggatggaagctgctggaagtcccagaaggacgaaccaattttgataatgacattgcactggtgcggctgaaagacccagtgaaaatgggacccaccgtctctcccatctgcctaccaggcacctcttccgactacaacctcatggatggggacctgggactgatctcaggctggggccgaacagagaagagagatcgtgctgttcgcctcaaggcggcaaggttacctgtagctcctttaagaaaatgcaaagaagtgaaagtggagaaacccacagcagatgcagaggcctatgttttcactcctaacatgatctgtgctggaggagagaagggcatggatagctgtaaaggggacagtggtggggcctttgctgtacaggatcccaatgacaagaccaaattctacgcagctggcctggtgtcctgggggccccagtgtgggacctatgggctctacacacgggtaaagaactatgttgactggataatgaagactatgcaggaaaatagcaccccccgtgaggactaatccagatacatcccaccagcctctccaagggtggtgaccaatgcattaccttctgttccttatgatattctcattatttcatcatgactgaaagaagacacgagcgaatgatttaaatagaacttgattgttgagacgccttgctagaggtagagtttgatcatagaattgtgctggtcatacatttgtggtctgactccttggggtcctttccccggagtacctattgtagataacactatgggtggggcactcctttcttgcactattccacagggataccttaattctttgtttcctctttacctgttcaaaattccatttacttgatcattctcagtatccactgtctatgtacaataaaggatgtttataagcaaattttgtgtgacttacctcattccacaccaaaccctcagaattatagaaggggaatgggatgagaaggctgttatgtcactgaaattgggcatccagcaactaatatttaattgtcacgaaaacagggaattcagcttttcntctctnttccaaatgagntttactgaatantgtgggntagtatgaagatcnccagtgt

SEQ ID NO: 103 - DNA, 2678 bp, Homo sapiens
  misc_feature: Incyte ID No: 235943.39c
gaattccctggctgcttgaatctgttctgccccctccccacccatttcaccaccaccatgacaccgggcacccagtctcctttcttcctgctgctgctcctcacagtgcttacagttgttacaggttctggtcatgcaagctctaccccaggtggagaaaaggagacttcggctacccagagaagttcagtgcccagctctactgagaagaatgctgtgagtatgaccagcagcgtactctccagccacagccccggttcaggctcctccaccactcagggacaggatgtcactctggccccggccacggaaccagcttcaggttcagctgccacctggggacaggatgtcacctcggtcccagtcaccaggccagccctgggctccaccaccccgccagcccacgatgtcacctcagccccggacaacaagccagccccgggctccaccgcccccccagcccacggtgtcacctcggccccggacaccaggccgcccccgggctccaccgcccccccagcccacggtgtcacctcggccccggacaccaggccgcccccgggctccaccgcgcccgcagcccacggtgtcacctcggccccggacaccaggccggccccgggctccaccgcccccccagcccatggtgtcacctcggccccggacaacaggcccgccttggcgtccaccgcccctccagtccacaatgtcacctcggcctcaggctctgcatcaggctcagcttctactctggtgcacaacggcacctctgccagggctaccacaaccccagccagcaagagcactccattctcaattcccagccaccactctgatactcctaccacccttgccagccatagcaccaagactgatgccagtagcactcaccatagcacggtacctcctctcacctcctccaatcacagcacttctccccagttgtctactggggtctctttctttttcctgtcttttcacatttcaaacctccagtttaattcctctctggaagatcccagcaccgactactaccaagagctgcagagagacatttctgaaatgtttttgcagatttataaacaagggggttttctgggcctctccaatattaagttcaggccaggatctgtggtggtacaattgactctggccttccgagaaggtaccatcaatgtccacgacgtggagacacagttcaatcagtataaaacggaagcagcctctcgatataacctgacgatctcagacgtcagcgtgagtgatgtgccatttcctttctctgcccagtctggggctggggtgccaggctggggcatcgcgctgctggtgctggtctgtgttctggttgcgctggccattgtctatctcattgccttggctgtctgtcagtgccgccgaaagaactacgggcagctggacatctttccagcccgggatacctaccatcctatgagcgagtaccccacctaccacacccatgggcgctatgtgccccctagcagtaccgatcgtagcccctatgagaaggtttctgcaggtaatggtggcagcagcctctcttacacaaacccagcagtggcagccacttctgccaacttgtaggggcacgtcgccctctgagctgagtggccagccagtgccattccactccactcagggctctctgggccagtcctcctgggagcccccaccacaacacttcccaggcatgagccctcaggggcccacatgagcttccacacactgagaagtgtccgagaaattggtggggcctctgaaggaggctgtgagcagcccacctgaactcccagctcaccagcccaaacagggtgcaggggctctggccctgaagaacctgagtggagtggaatggcactggctggccactcagctcagcgggcgacgtgcccctacaagttggcagaagtggctgccactgctgggtttgtgtaagagaggctgctgccaccattacctgcagaaaccttctcataggggctacgatcggtactgctagggggcacatagcgcccatgggtgtggtaggtggggtactcgctcataggatggtaggtatcccgggctggaaagatgtccagctgcccgtagttctttcggcggcactgacagacagccaaggcaatgagatagacaatggccagcgcaaccagaacacagaccagcaccagcagcgcgatgccccagcctggcaccccagccccagactgggcagagaaaggaaatggcacatcactcacgctgacgtctgagatcgtcaggttatatcgagaggctgcttccgttttatactgattgaactgtgtctccacgtcgtggacattgatggtaccttctcggaaggccagagtcaattgtaccaccacagatcctggcctgaacttaatattggagaggcccagaaaacccccttgtttataaatagcattcttctcagtagagctgggcactgaacttctctgggtagccgaagtctccttttctccacctggggtagagcttgcatgaccagaacccgtaacaactgttgcgggtttaggggctgtggtagctgtaagcactgtgaggagcagcagcaggaagaaaggagactgggtgcccggtgtcatggtggtggtgaaatgggtggggagggggcagaacagattcaggcaggc

SEQ ID NO: 104 - DNA, 806 bp, Homo sapiens
  misc_feature: Incyte ID No: 235943.36
  unsure 655, 777: a, t, c, g, or other
agcgcctgcctgaatctgttctgccccctccccacccatttcaccaccaccatgacaccgggcacccagtctcctttcttcctgctgctgctcctcacagtgcttacagctaccacagcccctaaacccgcaacagttgttacgggttctggtcatgcaagctctaccccaggtggagaaaaggagacttcggctacccagagaagttcagtgcccagctctactgagaagaatgcttttaattcctctctggaagatcccagcaccgactactaccaagagctgcagagagacatttctgaaatgtttttgcagatttataaacaagggggttttctgggcctctccaatattaagttcaggccaggatctgtggtggtacaattgactctggccttccgagaaggtaccatcaatgtccacgacgtggagacacagttcaatcagtataaaacggaagcagcctctcgatataacctgacgatctcagacgtcagcggtgaggctacttccctggctgcagcccagcaccatgccggggcccctctccttccagtgtctgggtccccgctctttccttagtgctggcagcgggaggggcgcctcctctgggagactgccctgaccactgcttttccttttagtgagtgatgtnccatttcctttctctgcccagtctggggctggggtgccaggctggggcatcgcgctgctggtgctggtctgtgttctggttgcgctggccattgtctatctcattgccttggctgtctgtangtggccgccgaaagaactacgggcagctg

SEQ ID NO: 105 - DNA, 3025 bp, Homo sapiens
  misc_feature: Incyte ID No: 401434.10
ggcttacgcgacgcgccggcgggtggcgcagcccttcgctcgcccggcctccccctccctggttccgcgttctggttccgccatggaatccaacaaggatgaagctgagcgctgtatcagcatcgccctcaaggccatccagagcaaccagcccgaccgggcgctccgcttcctggagaaggcacagcggctgtatccgacgccgcgagttcgcgccctgattgagtccctcaaccagaaaccacagactgccggtgaccaacccccacccacagacacaacccatgccacccacaggaaagcaggtgggaccgatgccccctcggccaacggtgaagctggaggagagagcaccaaaggctacactgcagaacaggttgcagctgtgaaaagggtcaagcaatgtaaagattactatgagatcctgggggtgagcagaggggcctcggatgaggacctgaagaaggcctaccgcagactggccctcaaattccacccagacaagaaccacgcacctggtgccactgaagccttcaaagccattggcacagcatatgcggtactcagcaacccggagaagaggaagcagtatgaccagttcggcgatgacaagagccaggcggcccggcacggccatgggcatggggatttccaccgtggctttgaggccgacatctcccctgaagacctcttcaacatgttctttggcggcggcttcccttctagtaacgtccacgtctacagcaacggccgcatgcgctatacctaccagcaaaggcaggaccgcagggacaaccagggtgatggcgggctaggggtgtttgtgcagctgatgcctatcctcatcctgattctcgtgtcagctctcagccagctcatggtctccagtccaccctacagtctgagtccaagaccgtccgtgggccacatccacaggcgagtcactgaccacctgggtgtcgtctactatgtgggagacactttctccgaagagtacacaggctccagcctcaaaacagtcgagcggaatgtggaagatgattatatcgccaacctccggaacaactgctggaaggagaagcagcagaaggaaggcttgctgtaccgggcacgctactttggcgacacagatatgtaccacagagcacagaagatgggcacccccagctgcagccgactgtcagaggtgcaggcctccctgcatggatagtcctgggccagccacaccaccgaggtccaaactatgaaatccctggagaatttttggtgacatgcactgagccaaggtgatggactgtatatttgaggaaagacaaacaaagaaacaaaattaaaatggaattggaggccgaacgctgcacagctgccctctctctcacccagtaaatgcagaaagctcttaggacagacagaaaacctgccatggggctgcttccctccctcgcagggctggcggaggctccgcatcgcctctctcctaggatacagaaaccatggcaacgaaagtagaatgtaaaactcgcagcagatatcagtgggaagggctgggggagggggcacccagctgcctttcctccctcacaggagccaccaccagccacctctcaggagaagccagaggccctggccaaagataggaggaagaaagagaactctccatagaatgtaatttatagatgcgtgtatatgtatatatatctatttatatgtaaataggcatatatgaagatatatatatatatagtctactttttaaactctgcagggatttggttaagttgttgagctgatttcttccatgttttagaaaatgaggcctgtttggggaaggtaccctggtgatgtttttgctagacattagctgtagctgacagcataaggagagtcgcatcagagcttttcacagccccccgaaaccccagcctggttttgatggcagcagtaatcatgatagtgtgaacccgcgaaggcctcaggattatggttaacctggagaggagcaggccatggaggcaggtgccaggtcagtattgagtcacagtagaggccccacaaggacctgcttgggtgagaccacctctcccctctcagcagcgctggtgggctctttgtcctggtgcccaggagccctccagccccctgcccacagaagggaaggcctgcagagggggccaggatctacctaaccatttccccacccctaagtccctcagtgggctttgccttataggtgccacagggcacagctccatcattgccactggtttttcctaagtcatgcaccaaggacttcagaaagttcttcctccgagtcagtcagtggtgccgggaccccagggcagcctcctcgactcctgaagaaaaggcagtgcccgtggctgcctctgtcttcactcgctgttgatgtgaccgccaggcctcctctcgtaccttggacaaaggatacacctgaaccagaatagttttcttaccctcacattgaaatgaggattttgcttaaaacagcacttgccgccagtgggaggagggaggttttatttattcccacagtttctcctgggccttctggaatgaccatgttttcctgtggcggtgggtgtgtcattgcgcccgccgtcttccaaagccttacttccccaagctgccagccaggaggtgataaccaccctcccagagtttctctcggctctttttttaaaagtcccccaacaaataggattcttgctgggaaaggaagttcggtaaggaaatgtcaaatctggtttttaaacaaggtccaaccctgcaatgaagcagccacttcagcccagagagattataagaactgatgtggccagagtgcctacccactgtggccccggtgctctgcccccacgccccgaccatctggtcttggtagatgtccctagacgggctgagccatgtgcaataagaacatagatcctaaaggatcctctggaagctgtatttcttgaattagaattctcaaattgtacatctgttaatatatgtttattatgtgaaa

SEQ ID NO: 106 - DNA, 2431 bp, Homo sapiens
  misc_feature: Incyte ID No: 234107.2
gccgagctgcagctcgggctcagtctccgccgccgccgtgaacatggagcccccggacgcaccgggcccaggcgcgcggggccccgcggctgctgttgctcgcagtcctgctggcggcgcacccagatgcccaggcggaggtgcgcttgtctgtacccccgctggtggaggtgatgcgaggaaagtctgtcattctggactgcacccctacgggaacccacgaccattatatgctggaatggttccttaccgaccgctcgggagctcgcccccgcctagcctcggctgagatgcagggctctgagctccaggtcacaatgcacgacacccggggccgcagtcccccataccagctggactcccaggggcgcctggtgctggctgaggcccaggtgggcgacgagcgagactacgtgtgcgtggtgagggcaggggcggcaggcactgctgaggccactgcgcggctcaacgtgtttgcaaagccagaggccactgaggtctcccccaacaaagggacactgtctgtgatggaggactctgcccaggagatcgccacctgcaacagccggaacgggaacccggcccccaagatcacgtggtatcgcaacgggcagcgcctgggaggtgcccgtagagatgaacccagagggctacatgaccagccgcacggtccgggaggcctcgggcctgctctccctcaccagcaccctctacctgcggctccgcaaggatgaccgagacgccagcttccactgcgccgcccactacagcctgcccgagggccgccacggccgcctggacagccccaccttccacctcaccctgcactatcccacggagcacgtgcagttctgggtgggcagcccgtccaccccagcaggctgggtacgcgagggtgacactgtccagctgctctgccggggggacggcagccccagcccggagtatacgcttttccgccttcaggatgagcaggaggaagtgctgaatgtgaatctcgaggggaacttgaccctggagggagtgacccggggccagagcgggacctatggctgcagagtggaggattacgacgcggcagatgacgtgcagctctccaagacgctggagctgcgcgtggcctatctggaccccctggagctcagcgaggggaaggtgctttccttacctctaaacagcagtgcagtcgtgaactgctccgtgcacggcctgcccacccctgccctacgctggaccaaggactccactcccctgggcgatggccccatgctgtcgctcagttctatcaccttcgattccaatggcacctacgtatgtgaggcctccctgcccacagtcccggtcctcagccgcacccagaacttcacgctgctggtccaaggctcgccagagctaaagacagcggaaatagagcccaaggcagatggcagctggagggaaggagacgaagtcacactcatctgctctgcccgcggccatccagaccccaaactcagctggagccaattggggggcagccccgcagagccaatccccggacggcagggttgggtgagcagctctctgaccctgaaagtgaccagcgccctgagccgcgatggcatctcctgtgaagcctccaacccccacgggaacaagcgccatgtcttccacttcggcaccgtgagcccccagacctcccaggctggagtggccgtcatggccgtggccgtcagcgtgggcctcctgctcctcgtcgttgctgtcttctactgcgtgagacgcaaagggggcccctgctgccgccagcggcgggagaagggggctccgccgccaggggagccagggctgagccactcggggtcggagcaaccagagcagaccggccttctcatgggaggtgcctccggaggagccaggggtggcagcgggggcttcggagacgagtgctgagccaagaacctcctagaggctgtccctggacctggagctgcaggcatcagagaaccagccctgctcacgccatgcccgcccccgccttccctcttccctcttccctctccctgcccagccctcccttccttcctctgccggcaaggcagggacccacagtggctgcctgcctccgggagggaaggagagggagggtgggtgggtgggagggggccttcctccagggaatgtgactctcccaggccccagaatagctcctggacccaagcccaaggcccagcctgggacaaggctccgagggtcggctggccggagctatttttacctcccgcctcccttgctggtccccccacctgacgtcttgctgcagagtctgacactggattcccccccctcaccccgcccctggtcccactcctgcccccgccctacctccgccccaccccatcatctgtggacactggagtctggaataaatgctgtttgtcacatcaacacc

SEQ ID NO: 107 - DNA, 6749 bp, Homo sapiens
  misc_feature: Incyte ID No: 233660.2c
tctcaactctcttttgccctcctagcttgacctactgatggctgcactcttttctaaatagtaacacatgctccaatgcatgcttgagtttgtgcagtattcttgtttctgaaagtcaagttgtgacaattaatgctgtatctaaccaaatgatcacagcctcctcttccccatgggaactacaatcaagaagcatcttccaatttcatgtacactatacctaggtggccacaagcttcatttgggccatgaactcctttgaaaccctcataaaaactgtcctactatctccctggtaaatcgcacatacacagagttttgcctttcaggacatatggccttataagattttgactactagtgaccaaaatgttgatgtttttcaaaaattacacagaattgttaagatggaatagttttattcagcaaacaaaaaacttgctaattcagagtatcctctagtccacgtaatgtggtttagactacatttgcaaaattagggccttgacgctgaacaaaataaaatccagaggaagaactacagtatccaatcaaaaaggaagtactagcaaatgaaccagaataaaagactttattgtattccatacattcacaggtcacttccagatttagtaacaacactgcaatgctatgatgctgtgcggtcatttagcttaaaccacagtgtaagttggtagctctctcctgctctcttggcctctagatgtatcacaatacaattcctaactgtggcctggcaaccaatgcttatttcattggattattttctgactgggacatgagttcatcgcatcttcccagaattttaaagtaccttcccttacattataagagatgaccaaacactctagtgtgagggctgcttcacacactgttcttatctatcatgattgctcttccttacatacacgtcccgtacagatcagctacacacggcatggtcctgaaaccacagcttttgtttctttggccagaatgcacccctcaccttgagtgcccgccttagaaacacaggtacttggttctcacagggtgtgcatggttgacacaagttcatctgccccacggtaaaagctcttcaaaacctttgcatgacttgtggggagcagggtcacaatttgttgcatgtgacctgcctcagcctcaaaagataagagatcatgaggctccaccgcccccgggctcaggaaacttgatccacatcgctagggctctgcctgttaggttatggatgctcacctgactctctgaagcagagggaggctgacacagattagcttttattgaaattattaaagtgcaactttgtgttttcactctatcaggcactgaaaagcaagaagcttttaattttttcttttctataatgaaatatattttctttactcttatttgtatctgtaatacacctgcaattagaaacagcagttaaacataaaacaaagaacagagcagaaggcacagtctaaagagtgggtatcagaagaattttaccatttacgctcataggaatactaaaccaaacccaatcagaccaaactccaaagcccattgtgtttacaagtctgcctcttttgtgtgatagcaagtcagtcctttaaagcagaaaccccatttactaaccctacatcccaagtaagcaggcctgtatcagaaccaaacagctgtcctcttacatcagaaaatctaagtgatctgaaagacaattcatcacaagtgtttccaattttcttctgagaacatcaccaatcccactaatgcaaactcagaacattacttcagtcaaatttcgctaaatgctatagctttcttcaaataaaaattagccagaaaaataccttagaaaagattttttttttcattgtggattccaggagacttttaagacatggaattctcggtgattatattcaaatggcagagccacatttgctaacagtattttctaattttatctttcttataagaaaaaaagggtaaaaatcggatctgaaatactgacagggttccccaaagttagatattaacacagcttttcatttctcttatgagaactttactgtaaatatacctttatcatagaaatgagatatccaatacacattacaaaatgtcatatttaaagatgacaaatctattcttaacccagattcttcatccacagaagtttaatgactaaaataacacaacagaatgaacaaatgttttattggcatgttcattgttgtaaacagcatctggcatgaaaaagttttaccaaaaccttttttattgatttttataaattagatggtatgtcaaaatttatgtagaattgtgttcattgagtacttttatttagcaaagcaaaaacttgctgatactaataaactctgcaatgaaatcatgttgactgcatcagtctgtaccatgacctgacctcattagcaagtttattctcagaacaatgttaagacgtttcccaaaagttaaactacatgtaactacaaattgactctaaaaattaaaactggacttacaagcattctagaagattcaaacttgaagtaaatcttcaaaactagatgtacaaagagaaaaaaattgaagccgctgaacagagaaacctcattaacaagggcaacgacaatcctatgggacctagcactgaggaacctcactgaggattacatttacatagattgctatacttctcaatgtacacaaatgtacagaatgaatgatacgtgaaaagaataatcatggcagatagttgaactgcaattatgataactcaacaggatcaattttatttacatgctgaataaatgaatgaaacatattctctacatccataacttaagtacaatcagttataattacaacactgcagcaatctgagctgccacctgctgggatcggtctaagggaaacgttctgatgttccagaataatgttcttaatactctgcaaaaaatgaaacaaaataaaaacacaacttcacaattccttactgggttacggctggttccaagaatttcttttcttcagctcctgtttttgctgctttccaagagtcaacacacgttggatttacttctgaattgtcaatgaggtaatgtgtgcatcagtgaaataaacagaaaattcattcattcatggcctttgcacagcttttattattaagctatgagcatcctgtttgaggctagttttactagcggctatgtgcacatttgtccgcaataaaagaagtttactcattcccctgtccccttttctaatagaaggttagctttttttgttgtttttttttatttttttgcacatcccttttcactttacagtacatttgactatagtgcacaacatgattccgagtcaaaacagtggcccattgggcactgagcttctgattggtgtagggcagtccaatcagtgctggtgtcactgggttaccccaaccatgtccggccaaaatggcactacccagtggtagtgaaccatctaattaaaaccaaaactcccccagggaaaatgctacactatcagagtcagtcttgagtcagatctttatttggtgctccatccagatatatttttagtgctttctctttacgaggtgagtatgttacacgatgtccagtcttctggagtcgactgctttcttttttcatcagttcatttctttgctcatctgtcaattccattaattcttctgttttatccctataaaatatgaccgcaccatcatcacagatataaagaggccagacattcagggtagaaactttaggattccagtctaaatcttgatgaatatcaaggacagaaatatcacagggaaatgttcctctacccttagcaaattcaatatcatccaaaggaatcccactgatttcactaagcttctctcgcaattcgtccacactactgctttccaatacaacctcctggaagggatccaacttcatctctgaaggcttccaccgtcttgacaaaactgcaagctgtgacatggacttcatcttctctaccccatcaagaacttcaaggaaaacctcccagttgctggaaatattaatatcttcttcataaatatgataatccaaaaagacagtgccaggattcttccatgtttttttccttagacgaaacctgtcaatactgagctctaaaccacattgctccctgagctgaggaattaattcctcttttgattgccgtacagtcattcctttagcaaacacagcatctagcagaaacttgcatggctcttgttcattgaccaaaagctggtatactttaactctgtattctccttttttaagtgctctccccagtctaattgtaatcttattgtcatcagaaaatgatgaaagtgtctcattcagccggacgctctcaaactcttgattgctggcatacactcgaaagaccttgaagtgagaggacaaaactccaacaaagggctctaaatgttgtttgaaagctgccagagtaattcttttatcaacatgcaccatcaaccatttatgtccttccccagaaccttcatctgcagcataaggttcagctttgaaatacatgtactgcatttctcccctactcttgccactctcatcatattcactatcagttccagagtcttcttctgctgtatcccatgtttcttttttcccttcatttgctttcgttcttctactacttgtgatactgtgagagtcaagtccattagccaaagggatctgagcattgtctgcattgcacaaagtatcactgctatgactggagctaagaatatcactgtccactgaacttgtactcctgtcattattcacatctgagtctgatcgttcttcagactgaaaattttctggatcagaagtctgaatatgctgttcaagttctctattatccactgatgctgaagagtccctctcattgagaggtgattcgatgttttcaaagtcacttgtctcagtacttttgctgctgtccccattatctccatcctgctgttgctgcagtgacaagcttttgagtttttcagtgctttcttctagaatagcttccacagactttaggcttcctacaggtcctttgactctttcacagtcatcatccacattaccagaatcgcctccagctttctggtatgctgtccttttggaataagatactggggattgttcaggtagcaaaacaaataatctgattgtatttgcatgccgatccaggagtttccataaatgagagtctgcaaaggccatctggtaatccaaagtctcggagctttcaacaaacaccttgttacttctaaaaaatccttcagctttcagggttttactggagacactgagaagacgcaaatcattgtagcagcgttccagcactattctcattgtttcagcaggtaaatggatggcctttgaaatcagttgtttgaattctgtaactgtctgatttaagtaagcacgaacagttataggagcagctacagattctgcctttagatcaacaacatgaactttcaccatcacttctccaggtttataagattggaaaacctgatcaggctttctcgtctccaacagcagatcaaacatatatgttgacttgacgccacctagtagaagccccattggtgtatcttcttctccttcatatgaccgttctagataatcatgaaactcatcatatttaacaaggcgacagcaatccaggggtattacctcttctaaatccatcatcttataagccatttctactgcttcctttaatgtcttatccttatgaacctccaatttattttccatcattacttgttttgtaggatgcaaacagaataattttatcttgcatgtattgcgctcaatttctcgttgtctcttttcttgttcttccaactctctctctttctgcaccaagtttttaatatgttctgggtattcatccacttctagaaattttgcatttctggctggatccttcagtctatagatcagcatatatgcatttgtggaacttgcgaaagcactagaataatatcctctgcttcctgaagatccaccatgtgttttcttaatgtcctcttgtgttatcctgctgacatgttgatcattgaagctgtaccactgctcatcactgaatgactttatacatgcataataatgaccaccagcagcgctcccagaatgaaccataacagagaaaagttcatagatcaaggaattcttttcaagtccagattttgagatcttttcagttccactattggtttcaagacagattccttcatcaacaccatcatcattggagaaatcgttgctcatctgatcactgtgacaactaccttcattttctgctccactgtcagtgcaactttcagtctgaggagatttctcatcttcaacatcaataaaagtactcatatctagttcctcgggaaatgtcattcgatcattcagtttaatcctatgcatggttgtataatcaaaatcgaatcttttcagctgtaaggtcagcagataaggaaaatgcaaaaaccgaaggcccttccgtgcatcacacttcttcttacaacgttcacaaaaatactgatttgggccatccagaatctctggctgaataaatgcatgcaatgcttcttccacactagcaaatgcttggctggacccataaggtcggatgaccaatggaatatcaagatatgtgtcgattcgccagccctcataaccacattccag

SEQ ID NO: 108 - DNA, 1033 bp, Homo sapiens
  misc_feature: Incyte ID No: 482423.1
gaacacagccatccacctggggacaaatcaagaagctgtcacagatgatggaagaaaacctgaggaaagcgggacaaccaatcacaatgagtaatttggtgatctatcacagtgatgatcaccattgccatgagtattccttcaacaagggctgacacagagaacaattatacttattgggcatatttatcaatcttgtctggcaataatgcctagatgatttcactctatggcacagttacacatgctttctgatctcagtatttaccataataaatctgctcctataattgaggcataccaccctcaaaaacctatttgtaaacaaaatagaacctggccagaaataatgaacaacttgtttagtaagattgcattgcagaacaggcagagatgctacgcaatgattcctatgggatcattgattggtcccctaaggggatgtttagcttaaattgcacctctcagtctgcatgccatggccacactagttcagatggtctgaacaaagtggtcagatggcagaaatgataagaagtatggcaaaagttcctattgtctggaaccatggcagtatagtgtcacctcaacctcaaatgatatggctcattgtaggagctaaacataaggatttgtgggaaactattaatagctcttaataagatcaaaatttgggaaagaataaaaaaagcatctagaaagacactctacaaacttgtctttggatattacaaaattaaaagaacaaatatttaaagcatcccaggtacacctgaccttaatgacagaaactggagtgcttgaaggagctgcagacagattagcagctagtaacccattaaaatggataaaaacacttggaagctctgtgatttcaatgatgattgtgcttttaatcggtattgtttgtctttgtatagtgtgcagatgtggatcctgactcctgtgagaagtagctcacagtgtcaaagctgcctttgcttttatcgatttgcaaatcaaataagggggacatattgggaacagcaccccc

SEQ ID NO: 109 - DNA, 5225 bp, Homo sapiens
  misc_feature: Incyte ID No: 441298.14
cggcaacatggcgacggtgcccgtgtactgcgtctgccggctcccctacgacgttacccgcttcatgatcgagtgcgacgcctgcaaggactggttccacggcagctgtgttggggtggaagaggaggaggcgcccgacatcgacatataccactgcccaaactgtgagaaaacccatgggaagtccaccttaaagaagaagcggacctggcacaaacacggcccggggcaagcgcctgacgtcaagcccgtgcagaatggcagccagctcttcatcaaggagctgcggagccggacctttcccagtgctgaagatgtggtggcccgtgtgccaggaagtcagctcacgctgggctacatggaggagcacggcttcaccgagcccatcctcgtccctaagaaagacgggctgggtctggctgtcccggcccccacgttctatgtcagtgacgtcgagaactacgtggggccggaacggagtgtggatgtgacagatgtcaccaagcagaaggactgcaagatgaagctgaaggagtttgtggactattactacagcaccaaccgcaagcgggtcctcaacgtcaccaacctcgagttctctgacacccgaatgtccagcttcgtggagccacctgacattgtaaagaaactgtcatgggtagaaaactactggccagatgatgcattgctggccaagcccaaagtgaccaagtactgcctaatctgcgtgaaggacagttacaccgacttccacatcgactctgggggcgcctctgcctggtaccacgtgctcaagggggagaagaccttctatctcatcaggccggcctcggccaacatctccctgtatgagcgctggcggtctgcctctaaccacagcgagatgttctttgctgaccaggtcgacaaatgctacaagtgcatcgtcaagcagggccagaccctcttcatcccctcaggctggatctacgccacactcacccctgtggactgcctggccttcgcgggacatttcctccacagcctgagtgtggagatgcagatgagagcatatgaagtggaaaggaggttgaaactgggcagcctgactcagtttcccaactttgaaactgcgtgctggtacatggggaagcacctgctggaggcattcaaaggctctcacaaatctgggaagcagctgccccctcatctagtccaaggagctaaaattctcaatggtgctttccgatcgtggacgaagaagcaggctttggcagagcatgaggacgagctcccggagcacttcaaaccttcacagctaatcaaagacctggccaaagagatccggctcagtgagaatgcctccaaagccgtccgaccggaagtgaatactgtcgcctcgtcagatgaggtgtgtgacggggaccgggagaaggaggagcccccgtctcccattgaggccaccccgcctcaatccctcctggagaaagtgtccaaaaaaaagactcccaaaactgtgaagatgcccaagccatccaaaatccccaagcccccgaagccccctaagcccccaaggccccccaaaacgctgaagctcaaagatggaggcaggaagaaagggaagaagtcccgggagtcagcctcacccaccatccccaacctggacctgctcgaagcccacaccaaggaggcactgaccaagatggagccgcccaagaagggcaaggccacaaagagtgtcctgagtgtgcccaacaaagatgtggttcacatgcagaatgatgtggagaggctggaaattcgagagcaaaccaagagcaagtcagaggccaagtggaagtacaagaacagcaaacctgactccttactgaagatggaagaggagcagaagctagagaagtcgcctctagctggaaacaaagacaataagttctctttttctttctccaacaagaaactcctcggctccaaggctctcaggcccccgacgagccctggtgtgttcggggccttgcagaacttcaaggaggacaagcccaagcccgtgcgggatgagtatgagtacgtgtcggatgacggtgagctcaagatcgacgagtttcccatcaggaggaagaaaaacgccccgaaaagggacttgtccttcttgttggataagaaggctgtgctgcccacgcctgtcacgaagccaaagctggactcggcagcgtacaagcagagtgatgactcctcggacgagggttcgctgcacatcgacacagacaccaagcccggccgcaatgccagagtcaagaaggagagtgggagctcggcagctggcatcttggacctgctgcaggccagtgaggaggttggcgcgctggagtacaaccccagcagccagcccccggcctcccccagcacacaggaagccattcagggaatgctgtccatggccaacctgcaggcctccgactcctgcctgcagaccacgtggggagctggccaggccaaggggagctcgctggctgcccatggtgcccggaagaatgggggtggcagtggcaagagtgcaggcaaacgactgctgaagagggctgccaagaacagtgtcgacctggacgactacgaggaagagcaggaccacctggatgcctgcttcaaggactcagactacgtttacccctcactggagtcagatgaagacaaccccatctttaagtcccggtcgaagaaaaggaaaggctcagacgacgctccctacagcccaacagcaagggtcggcccatcggtgccaagacaggacaggcctgtgcgtgagggtacacgggtggcttccatcgagaccgggctggcggctgctgcagctaagttgtcccagcaggaggagcagaaaagcaagaaaaaaaagagtgccaagaggaagctgactcctaacaccacctccccttccacctccacctccatctctgccggcaccacctccacctccaccacgccagcctctaccacccctgcctccaccacaccggcctccaccaccccggcctccaccagcacggccagcagccaggcctcgcaggagggcagctcgccagagcccccgcctgagtcgcatagcagcagcctggcggaccatgagtacacagccgctggcaccttcaccggggcccaggctggccgcacctcccagcccatggcccctggggtctttctcacacagaggcggccctccgcatcgtctccaaacaacaacaccgctgccaaaggaaaacgtacgaaaaagggcatggcgaccgccaagcagaggcttgggaaaattttgaaaattcatcggaacgggaaactactcctttaagatttggaaagccaggatccttctgctccgctcaggacccccggagccccgcgaaaacatctgcctcccaggagggtgccgagctgcctcacaagggagggccttgcctcttcccggctgccatctccccaacaagcgtctgtcccttcagccggcagagcgagcccagcgtggcccctcaatttgaaaatggacgtcttttctcaagttgctaagagtgatctgtcccagaaaagcggccctgcaagtttgaggaccgcttattccactttaaggacagccttcaggccccctgagcgtgggtgtgattgcagggcctctgcagctctgctgagagcatgagtccttcaaggaagacagagtgagccagtgctcaccagccccagagtcagagctggccacaggctggcagcctccaggggcttaaaaaaaaaggcaaagaacacagaaagaggaggagcaagtgggatgtttatgtccccccttctcttcctgagtgattctcagccaagtccagacagtgctcggcgggtgaggaagggtctgccccgagctttctggttggcaggtggcagcaggatggtggatgttcagcctgaatgcccaggagcatttctggggggcagctaagactggcagctgggttggtgtgttagcgggcaggggagccattgtggggtccccaggaaagggcaagggctcagccacatcttggggtctgggaggcccaggctaagccatgtggcagggaccgtcttgccctgctggccacactctggagaagcacttctcagccaaggcacccctgccctgggactggcagggcaggggcaggggcagggacagtggccaggcggcccgaggacttacggtcggcacttctctgttctcccgtgtcagcgtgtggtgtcgcctgcatgggtcgtacctggatggtgtgtccaccatcgacacggaggggctggatttgtttctcaggcaatcctgtattttaattttagatgtatttcctgaagcatatttttcatagaatgtagcgtgtaaatagctttttaaataacttcttttttataagagtaaaagtatctttaggaatttctttctatagagttcttcattaacatttatacgagttttttgctgagtcagatggacagttgggttctgatgctttttccttctcctttccttttattattattatttttttcttttaagaactaaggtattgcctgaaaaacaagtgatgtctgtgcagccttacactctgtctttacagaagcaaatagtacacaaaagatctatttcagacacattttgaagatgaatcttcaactttaataccagctctttgttttccttgtatgatgaggggattgggggatacagttattttactagcaccttgtgaagtgtttccgtgttttgtgatgctgtaatttattaatgtttgtagctttttatatttgtacatttcttatgagctttgtttatatacccattacctggatgtttttgtccactgggagaggcagcttggtggaggccttatccactcccacttgtcctgtttggagggacgcagtccctagggcccgagactgggtgggagagggggagtctcacggggccccaggcttattcagaactggtgtttttaaagtttcctttaccctgcccttgttgaacatttatataatctaacctggacatcaagctgttctctctctctcttttttttaattttattattattattttggcaacatgtacatttctaacaaagtttatcgtggctattaaagtgttttatttcccaattcatattactcttgtatcgagtccatgaggtctaaggcaacttagatcaaagttttaaaaaagtaaaaatatttcaggttttgtacag

SEQ ID NO: 110 - DNA, 1367 bp, Homo sapiens
  misc_feature: Incyte ID No: 235333.1
  unsure 1364: a, t, c, g, or other
ggttacaggtgtgagccatcgcgcctggccaggacctttgtttcttatctacatattggaagatttggtcctgatgtcctttgaggcttctttagctctagttctctgacacttcagcctatatcacagctaacttcctcagtctcatctattccttatgctccagcccctggcaatttgcctcaagatgggggtttgaaaataactttacctgactcaaggagtgtctggagcacctcctagtctaagtctgcaagctccagttcttgcctaaaaccatgccagtggccacccttgggctcagacagctctgggccttttgaccacaagccagcccctcgccctctctgtggcatagtcttctctgccccaggactgcagggcggcttcctccaaggcttccaaggctcaaaagaaatttggctccatccaagaaggctccagctcccctactggcccctggctcaggcccacacccctggccaggcccagagagtgtgtctcaggagaattcaatggctctagagagacacacagaaagtttggcatttggaaatttcaaggatgtatgtatgctcacgtatggagcaggttgtcctggtccctgggtgcagggaagtgggctgcagggaagtggattggaggggagcttgaggaatataaggagcgggggtggagactcaggctatggacaaggacagccccaaggttgggaagacctggccttagtcgtcctcagcctaggggcagggcagtgaagaaagctctccccgctcctgctgtaatgacccagagtagcctccccaggccggcatctcatgtgtgtcttccaccatcctcatggtggcacttttctaggcctgtctcccagcattgtgcaaggctcggaagagaaccaggaagtgaaactgggtgaaaacagaaagctcaatggatgggctaggttcccagatcattagggcagagtttgcacgtcctctggtcactggaatccacccagcccacgaatcatctccctcttgaaggattttatttctactgggttttggaacaaactcctgctgagaccccacagccagaaactgaaagcagcagctccccaaagcctggaaaatccctaagagaaggcctggggcaggaagtggagtgacaggggacaggtagagagaagggggcccaatggccagggagtgaaggaggtggcgttgctgagagcagtctgcacatgcttctgtctgagtgcaggaaggtgttccagggtcgaaattacacttctcgtacctggagacgctgtttgtgggagcactgggctcatgcctggcacacaataggtctgcaataaaccatggttaaatcctgaaaanaaa

SEQ ID NO: 111 - DNA, 1111 bp, Homo sapiens
  misc_feature: Incyte ID No: 221872.11c
aaacctattcaaggtctaaataattccaacagtaaggctggaattttcctctaactgtgctcaacatcaaactgacattgagataaattgagatgagccaaactcataacaaaatgaatgtaacatttttacaaaaatgaatgaagaacttaagaaaggggaaggtgccaaatgtataatgggaggagtgtagagagagggataatgggagcagtgtagagagagggaggattaatcggggggaggaaggggatgcagatgcaatagggcatgccctgccccaccccagcatgctctctggagtctttcatcccttccatcagtcaaaccacaaagtgtgatgaagcattgctccccgtatgttataccctcccacccccacgccccccccacagcagtgtctcttaagccatttgtccattatttggtttgttgagatatcttttctcttgcattagggatgtgggaggcaaggcagggatggagaaaggccagtgccaaacactatccacttaaccccatctcctgtctttcttgggcttttctccccaagacgggtctcacggccaaggaactggaggccctggatgaggtcttcaccaaagtgtacaaagccaaataccccatcgtcggctacactgcccggagaattctcaatgaggatggcagccctaacctggacttcaagcctgaagaccagccccattttgacatcaaggacgagttctgatgttccccctgcaggagcaggttcttgggagcgtgaggcaggaagacactaggtgctgaatctcctgcaaaactggctgcctggaggccctgagccacccagatctgaataaaacagatgcttaccctggaagagcaaatgcctcctgttgtccttggtcaggggttctgtctacctggggacccctgtctgcacaccagggatcaataagagccaaagtgggacacctcctagatgtcagtatcagctggctgggcagtggaattttgagcgacctttactttatacttttctgtgcttgacagattttcagccatgaccatgttcactttataatcaaaacaaaaataaaggtcccatttttacaaaaggaaaaaaaaa

SEQ ID NO: 112 - DNA, 1399 bp, Homo sapiens
  misc_feature: Incyte ID No: 992317.12
gtgggcagccgcggcagtgttggtggagtgcggcaccgtatggggctccggagtggctgtggcaccccgccttgtagtgacctgtcggcacgtgtcccctcgggaagcagccagggtcctggtgcgctccaccacccccaagagtgtggccatctggggccgtgtggtatttgccactcaggagacatgtccctatgacatagcagtggtgagcctggaggaggacctggatgatgtccccatccctgtgcccgctgagcacttccatgaaggcgaggctgtgagtgtggtgggctttggcgtctttggccagtcttgcgggccctcggtgacctcaggcatcctttcggctgtggtgcaggtgaatggcacgcccgtaatgctgcagaccacgtgtgctgtgcacagcggctccagtgggggacccctcttctccaaccactcaggaaacctccttggcataatcaccagcaacacccgggacaataatacgggggccacctacccccacctgaacttcagcattcccatcacggtgctccagccggccctgcagcagtacagccagacccaagacctaggtggcctccgtgagctggaccgcgctgctgagccagtcagggtggtgtggcggttgcagcggcccctggcagaggccccgcggagcaagctctgaggctgtgttaccacctttggaaagaagagtgacctttttctgctgtaggaagtgatgttgaggtgacggtggcctcaggattcagggcccagcccctgcaggggcccaggctgcctctcatctccacccactgactgcagactgggctttgggctctggggcaaacttctcttcagccccatggatccttaacctggcagcccgttttggggtgctttcttgagcccccagttctctgtcccctagcactagactcagctgtattgtttttccttctggggagcccactccaactgcacagaagttctgggcctgacaggtagattccagctggaaggcaggcccgtgcctggttttgcgtctgttcccctgagggccatcgtcatcctggagcttcaatggggccttggctcctgtctgcctctcagtcagagtcagggctgacaaaggactcagcttccttagcatctcagcagaaaccttgctctgaagaccagagacagaagggacagaaacaggagtgcctcctgctgtgccaggcccatgggcagtgcaggcagatccctgaaggtcagcactcctgggtcttcatatgccaacaggggcgctcttgacactgtgccttcattttccagcccacagcctgggtctcagggatcttgaggggtagaacatgtctggttggggcttgggaataaacatgatctattgaaaaacctctgt

SEQ ID NO: 113 - DNA, 3317 bp, Homo sapiens
  misc_feature: Incyte ID No: 230936.6
  unsure 1746-1768: a, t, c, g, or other
gcaggttccgcccctgcgcgtttctttcggagcggcggtgaaggtcctgggtgaggtaggggtggatggtgcttgccgcgtatcatggctgcctccggaaaactcagcacttgccgtctccctccgttgcccacgattcgagaaatcattaagttgttaagactgcaagcagcgaagcagctatcacagaatttcctcctggacttgaggctgacagataagattgtaaggaaagctggcaatctgacaaatgcttatgtttacgaagtgggccctgggccagggggaatcacaagatctattcttaatgccgacgtcgctgaacttctggtggttgaaaaggacactcgatttattcctggattacagatgctttctgatgcagcacctgggaaactgagaattgttcatggagatgtcttgacatttaaggtagaaaaggctttttcagaaagtcttaaaagaccctgggaagatgatcctccaaatgtacatattattggaaatctgccttttagtgtttcaactccactgattatcaagtggcttgaaaatatttcctgtagagatggaccttttgtttatggcagaactcagatgactttgacttttcaaaaggaagtggcagagagacttgcagccaatacaggaagcaaacagcgtagtcgcctctctgttatggctcagtacctctgcaatgttcgacacatctttacgattccaggacaagcttttgtccccaaaccagaggtggacgtgggcgtggtgcacttcactcccttgatacagcccaagatagagcagccattcaagctggtggaaaaagtggttcagaatgtatttcagttccgaaggaaatactgccatcgagggctcagaatgttattccctgaagcgcagcgcttggaaagcacgggcaggctgttagagttggcagacatagaccctactcttcggccccgccagctctccatctcacactttaagagcctctgtgatgtatacagaaaaatgtgtgatgaagacccacaactctttgcatataatttcagagaagaactcaagcgaagaaaaagcaaaaatgaagaaaaagaagaggatgacgcagagaattacagactctagctgctgcctgggggcgagcagcctaccagatgtcgatttgcactacgtggagcttcttatataggtactcttttgtctttacagaatgacgatacaaatgccaatgaccagatgtgacttattttccttttactatacagcttggcagagaaaataaatatcatcaaataagatacagtacaagctttcttttaatatatactgtatagatagatatgacatgtttagtataaacagcatctattacaatcttacaaaaatgaagtatctgcacattttgctcctaaaccacattaaaataacttaaatatgctttaaataaagcaaaaactaacaaacagctgaaagaaaatgcccagaggattttaaaaaatggccctttgaaaactattaatcacgacttccccagccttactttttccacataacttaattattagaatgtaattttaaggatcctaaatcatttgatacctgctcaaagtggatataaactaagtaatttacagattctgaccagtttcatctaggtttctgatccacaataaattaaaataacttaaatctttacaaccattttgtgggaaaatgtatactgcacaaaacccaggaatgaacagnnnnnnnnnnnnnnnnnnnnnnngcaatttccactttaccaccagtttaaaagtaaaatgaggaatttaacccatatctggattgaatcatactatgattttccgtggctctctgtttcataaaaacactcctcactgacaacagatgttaaactctggacactgaattctcgctctagaacagaatttaggtcgatggtggcattttcagactgactgtcaagggactggtgacggatctgcgccttgagcaaagttcctctgtccctcttggtgctgttggcttttcgtttaatggggcagaagtgcccccggaccagtttgggctgctctcctcctttctgaccctcacccgactccgggccaggctgctgctcagcctcggggtgaacgtctgggtcctcggaaatcctcagtctctggaactgaatttcgatgtctttagtagggctgccctgcttcacagtctgacggtggtcatcatcttcatcgctcaggatgtcactctctttgatgagattgtcggcaaaatctgccaagccggggtgtgggtatttcccgggagaagtgctcttggagtcctgcctgccctcagccgtggggcagccgctgctctgggtgccgctgctcaagctgccctcgtcagagtccagcaaggttcccttgccagtctcaccggtccactcgttgctggaggaattcttcaggacttttaaagacctggatgaagctaatttggccgaaacaggaactcggttcttaagaggtaccaggcgatccttacacgttttctccagtggtaattcacactttatgtgacgcctgaagttctccctcagaatagaacgaatcaccttaacaatgttggttttgctttcactgtcactgcaacacaactgaaagatggtttctggccgtccttctatttctgacttcgtatggatcagttcccatatggaattattttctgtccctatgtaaaaggaaatggaaacaagagtctacaactttgcccaaaatgctgtggttaagaacacttgtaaagttgaaatctcatcagttaagaaagtctaatattcccagtcctggctcattttcttctgtggcttgttctatgtatgattttcacagttacaagaactgaaatgccttttggttactttttacatttcctgctgcagattttcctccatctgaactgccttcaccctctctctggagcccctctctggggaagaggagattcagtggatcctattcttcaacctcctttgcagttttgccctttccttggaaggaacaggagctggggtacttgaggtaaaagaggcctgccccaaatgtggtcattttctcgaaaacataagcacttctgacaaaagttaaacagaagcccagcaggtcactgcatgactcagcctgctggcctcttctgtcaccagatacctgtcaccaaaacaaggttactctggaaggatctctgaacattttccagagtcaaagatttttttctttttatatcacctacagtactacctaaccttaaggaattttctgctatattctaaattt

SEQ ID NO: 114 - DNA, 836 bp, Homo sapiens
  misc_feature: Incyte ID No: 029508.1c
cacaagccaccgtctctgcttgtccagagcagggatttcaccatggccaatctacagaccagaagtggacgatgcaaagtgcccgcaccgcattccaaagctgtgaaaccacttgggggtgatgggctatttgggattgtcggtggtagggtggattctgccaggctgggcacagaggtctgtctgatgccccaattgggcctataaatggcggggtgggagagagggatattcaatactcttcaggagttctgatatgccatctcagatagacccagccatctccccaagcccatgcctcggaagtgcactgacagggtgcagatccttaagggtgttgtccttccagacacacacagtggcctgagctccaactccagcatgaccacgcgggagcttcagcagtactggcagaaccagaaatgccgctggaagcacgtcaaactgctctttgagatcgcttcagctcgcatcgaggagagaaaagtctctaagtttgtggtgtacccaatcatcgtcatccagactgggagctttgacaacaacaaggccgtcctggaacggcgctattccgacttcgcgaagctccagaaagcgctgctgaagacgttcagggaggagatcgaagacgtggagtttcccaggaagcacctgactgggaacttcgctgaggagatgatctgtgagcgtcggcgcgccctgcaggagtacctgggcctgctctacgccatccgctgcgtgcgccgctcccgggagttcctggacttcctcacgcggccggagctgcgcgaggctttcggctgcctgcgggccggccagtacccgcgcgccctgga

SEQ ID NO: 115 - DNA, 658 bp, Homo sapiens
  misc_feature: Incyte ID No: 984900.1
caaaactccatctcaaaaaacaaaaacacctcactgctgtttcctaagtacatacttaagaaaattgggatacatggtggtggttcatggatgttgataaggaattaaaatgtaccgtgcgactctctgtttcagtggtgacttttacctgtttagtataaatattcctttgcttccaaccataaatgtgttcttagaaatgggcctatagtttagtaacctatagtttggtaataggcttgtttgttttcagatggattttggttctgtgagctaaagctattttgcattaaagccttcgtcctcacacattgttttgacatatttctagtcttcataaacttttttaatttagatttttttcccttcacaagtatacatctgttttagcaaatagccttatgaaggttgtagatgtattattttgggcatgcctggtgatttctatattttttccaattacatttaaagctttatgttttaggaatataagtacattttatttctactttttattatatatatttaattgcacaagtactactgtctagaaaaaaatgggatgttgctaacacagcattgttggcttgtaggcagtgctgtcctgtaaatagattgaaatgtatttttatcagctggtatataaatttgaggaaag

SEQ ID NO: 116 - DNA, 6006 bp, Homo sapiens
  misc_feature: Incyte ID No: 405158.1
  unsure 3239-3273: a, t, c, g, or other
agctattgatgctgttgataacaaaaaaaacacacccttgcactatgctgctgcctcagggatgaaagcctgtgtagagcttttagtaaaacatggaggagacttgtttgctgagaatgaaaataaagatactcctgtgattgtgctgaaaagcaacaccacaaagatttggccctcaatctggaatctcaaatggtattctcacgggatcccgaggctgaagaaatagaagctgaatatgctgcattagacaaacgagagccatatgaaggattaaggcctcaggatcttcgtagactaaaagatatgcttattgtggaaactgcagacatgcttcaggctcctctctttactgctgaagctttacttcgagctcatgactgggacagggagaaattacttgaagctggatgtccaacccggagaactgctgccaacgatcaggtgttcaaatgccaactccaccaccaagtgggtataatgcctgggacacgctcccatctccaagaactccaaggactacacgctcttctgtcacctccccagatgaaatcagcttatctcctggggatttagacaccagtttgtgtgacatttgtatgtgcagtatctctgtatttgaagaccctgtggatatgccctgtggacatgacttttgtagaggatgttgggagtcgtttttgaatctgaaaattcaagaaggtgaagctcacaacattttttgccctgcatatgattgcttccaacttgtacctgtggatatcatagaaagtgtagtttcaaaggagatggacaaacgatacctacagtttgatattaaggcctttgttgaaaataatcctgccattaaatggtgtcctactccaggctgtgacagagcagtaagactaacgaaacaagggtcaaatacatctggatctgatacactcagcttcccattgctgagagctcctgctgttgattgtggaaaaggacacctcttctgctgggagtgccttggtgaagcacatgagccttgtgactgccaaacatggaagaattggctgcaaaaaataaccgaaatgaaaccagaagaacttgtgggagttagtgaagcctacgaggatgccgccaattgtctctggttattaactaactccaagccttgtgccaactgtaagtctccaatacagaagaatgaaggctgcaatcacatgcagtgtgctaagtgcaagtatgacttttgctggatttgccttgaagagtggaaaaaacatagttcgtccactggaggttattacagatgtactcgctatgaagtcattcaacacgtggaggagcaatccaaggaaatgactgtggaggctgagaaaaaacacaaacgatttcaggaacttgacagatttatgcactattatacaagatttaaaaaccatgagcatagttatcagctagaacaacgccttcttaaaacagccaaagaaaagatggagcaattgagcagagctctcaaagaaactgaaggaggctgtccagataccactttcattgaagatgcagttcatgtgctcttaaaaactcggcgcattctcaagtgttcttatccatatggatttttcttggaacctaaaagcacaaagaaagaaatttttgaactaatgcaaacagacctagaaatggtcactgaagaccttgcccagaaagtcaataggccttaccttcgcacaccccgccacaagatcatcaaagcagcatgccttgtacagcagaagaggcaagaattcctggcatctgtggctcggggagtagctcctgcagacttcaccagaagctccaaggcgcactttgctggtggaacatgggattgggaatatttaggatttgcatcaccagaggaatatgctgaatttcagtatcggaggaggcacagacaacgtcgtcgaggagatgttcacagtctactcagtaatcctccagaccctgatgagccaagtgaaagcactttagatattccagaaggcggcagcagcagccgcaggcctgggcacatccgtggtaagttctgcatctatgagtgtgctgcacagctcttccctgcgtgactacacccctgccagtcgctctgaaaaccaggactctcttcaggctctgagttcgttggatgaagacgatcccaatatacttcttgcaatacagttatcactgcaagagtctgggctggccctcgatgaagaaactagagacttcctcagtaatgaagcatccttaggtgcgataggcacttctttaccttccaggctggactctgtccccagaaatacagatagccctcgggctgcattgagcagctctgagcttttggaacttggtgacagcctcatgagactaggagcagagaatgacccattttcaactgacaccctgagctcacaccctctcagtgaggcaagaagtgatttctgtccctcatctagtgatcctgactcagctggccaggaccccaacatcaatgacaatcttctcggcaacatcatggcttggtttcatgacatgaaccctcagagtattgccctgattcctccagcaactacagaaatcagtgcagattcccagctcccctgtatcaaagatgggtcagaaggtgtgaaggatgtggaaatggtgctgccagaagattcaatgtttgaagatgccagtgtcagtgaaggtagaggaacccagatagaagaaaatcctttggaagaaaatattctggcgggggaagcagcatctcaagctggtgacagtggtaacgaggcagccaacagaggagatggttcagatgtttcaagtcaaacacctcaaacctcaagtgactggcttgaacaagtacatttagtgtgaactgcacacatctgggctctaaatgaattacaggtacagatggtatgctaggtggagtatgcttgatagagactttgattcacttaattccaactcagtgataaaccactgacattagggttgaatacagagaagttcccttgaatggtagcttcattttttattttaaccttacagggaatttcctttgtacttaattgaatagcttttcccctttttgctgacaaaaagaagagcaagagaaagagaaacaaaaatgaaataaataagttgtattccacactctaagaaaatgcagtcctctatttagcctaggcttgacaatacttaaattgaacatttaaactaaaggcttactccctaatctttgggtggcnnnnnnnnnnnnnnnnnnnnnnnnnnnnnnnnnnnctagaaatttattttggataaatccgataacatatatgtcctcaatctctttgtgctcttccataacttacttcctttttgtctgagcaatgtgaattgaagtctctttagtaccacatctaccatagtgtaattagttttaattttcacatgaatcaaaggtttcctttcatgtctatttacagtccaattgtgccaaactcttacttgtgtgctgactaacaaggcatttaggtgtgcagcatcctagagtgctccagggcagtgtcagcgttctcgggagtaaaaggtgccacttggtagcaatgatattccagaattaaatgggtttttgttgccatggagactgcatttatataaatgtagcctgtagcttaagttaactaaacctaatgctgctgttaaaaacagtttattttaatattaaaatacagttgattagcaacagcggtgctgtattttaagagacactttattggaagtgcaatcatagttatttgttttcacaattttacagtgcattctaattactgatgggtgcaattacttttaatcgtgttttataaaatagaaaaaaagtggagttttcatgagttatagtaaatcccacgattattaagaaattcagtaaaacatcctgcgcaacatgttaccgtgcctttgcctaacctaaatggatagttgccagttaaataagtgagtaattcaaatttcaatgtctcttctgaagtaactatgctatgaattgcaaagacctccataaaaccacccatggccttgcttttacactaactataacaactaaatgttcaatcagtttgtttgcctaactagcaaatgctgacatgtgtttgttctactgcgcaatactcatttgctgtgtgattactgtttagtgttgaaaaaaatcaacttcctagttatcagtgtcttactgtgaagaaaatactggtcttagttgtaattaggatacaatggtacagtgtgtaattaaaactagagtaaactgttggaatggctgttttacttaaatattatcaaaactagcataacataagcaaaatagataagtacaacactccatttagtgttttgccagattgttaccagaagtctacagataccaaactttcagttctgagtttgtacaggcaagtcctgggctgggtaaaaagttatattaatattgttatccacaagagatgtgattatgggttttgattactttttttttttccaaaccctgcttttgaaatatccttgtacttaaaattcatattgctaagacactgtattagaatatttaatattccccagatcctcttaggataaactgtgggaatcctcctatgccatggatatcaaaggtccacattagtttttatttctccagtgatcagaaacattgatatcaatccctattaaattagtggggggaatattaactttatctacagtgtattactgtatattaaactgaaatagtccattaaaggatttttttataaatttattttggattaaaaatatcaacaccaataagtttttagaccaagttgtaatttttccaatatagagtctttgcatcacactgaggcatcttgcacagctgcagttaaggtgagaaagaatgctctgtgtgaagacagtgtacacaatgggttccggtttccttgcaccttgtgcagtatcctttatttctgtgctgttctctcctgagcatgaaaaatgatcattatccaatttgtatttccttggtacatattttaaaaacaacacagtcattgactttacaattcagtaatgaagtttggcaaagcctattttgtaaacaagttaattttataatgtaaaaaaaaaaagttaatctaaccttgacttgttatttgcactttcatagtctatacttgatacattcccactttatatacagtaggattctacaaacgtgtagatgtttggccaaatgaatgctgttaataatatgtaaaattctttgattaaacatttattacttaaactacttccattttgtctcattacattgtagactttgttttaaccaagtcagaaagctgattttcttcaaattaaatccctccaatgtgatgggatcaatttggttcttacatgtaattgattagtgcctaatatttttacactagcccacttactgaggcattttatatccccagttataaatatggaaaacactgcatgacaatgtgttaaaacattatggacatcagtgctcattttattgacatcactgtagctttcaggagaaaaatgttattttttcttgaactctaatagaaatacatagaaaaataactttaagatatgttttgtgaaattgcttaggaaagaaaaaaattttatgcccatgtgaataaaaatgcctgcttctctttcactttattattgtgtcccttatgagttaccaaaataacccatgacatttgaccagtgccccagctggtgcttcatggggtctgctggtgataatcatttaaagtggcgtcatcttatttatgcctttcattatgtggatctgaagcttaactaccaatgttcataggctgaattattccttaattgttgttcattacagccactgatctcattttttatctcctttgagtcctcaaatatttatcatttacgtgttatgaattaaaatctggaatttattaaagtttgatcataacacgtaaatgataaatatttgag

SEQ ID NO: 117 - DNA, 1902 bp, Homo sapiens
  misc_feature: Incyte ID No: 334177.1
  unsure 39: a, t, c, g, or other
actgcgccgggggcagcgagggcaggaagacctggcggncgccggggtcagcagccgcctcctcccccgcggaccgaggcggcgccggcggccggacagcccgtggagagcttcccgctggacttcacggccgtggagggtaacatggacagcttcatggcgcaagtcaagagcctggcgcagtccctgtacccctgctccgcgcagcagctcaacgaggacctgcgcctgcacctcctactcaacacctcggtgacctgcaacgacggcagccccgccggctactacctgaaggagtccaggggcagccggcggtggctcctcttcctggaaggcggctggtactgcttcaaccgcgagaactgcgactccagatacgacaccatgcggcgcctcatgagctcccgggactggccgcgcactcgcacaggcacagggatcctgtcctcacagccggaggagaacccctactggtggaacgcaaacatggtcttcatcccctactgctccagtgatgtttggagcggggcttcatccaagtctgagaagaacgagtacgccttcatgggcgccctcatcatccaggaggtggtgcgggagcttctgggcagagggctgagcggggccaaggtgctgctgctggccgggagcagcgcggggggcaccggggtgctcctgaatgtggaccgtgtggctgagcagctggagaagctgggctacccagccatccaggtgcgaggcctggctgactccggctggttcctggacaacaagcagtatcgccacacagactgcgtcgacacgatcacgtgcgcgcccacggaggccatccgccgtggcatcaggtactggaacggggtggtcccggagcgctgccgacgccagttccaggagggcgaggagtggaactgcttctttggctacaaggtctacccgaccctgcgctgccctgtgttcgtggtgcagtggctgtttgacgaggcacagctgacggtggacaacgtgcacctgacggggcagccggtgcaggagggcctgcggctgtacatccagaacctcggccgcgagctgcgccacacactcaaggacgtgccggccagctttgcccccgcctgcctctcccatgagatcatcatccggagccactggacggatgtccaggtgaaggggacgtcgctgccccgagcactgcactgctgggacaggagcctccatgacagccacaaggccagcaagacccccctcaagggctgccccgtccacctggtggacagctgcccctggccccactgcaacccctcatgccccaccgtccgagaccagttcacggggcaagagatgaacgtggcccagttcctcatgcacatgggcttcgacatgcagacggtggcccagccgcagggactggagcccagtgagctgctggggatgctgagcaacggaagctaggcagactgtctggaggaggagccggcactgaggggcccagacacccgctgccccagtgccacctcaccccccaccagcaggccctcccgtctcttcgggacagggccccagccgtcccccctgtctgggtctgcccactgccctcctgccccggctttccctgcccctctcccacagcccagccagagacaagggacctgctgtcatccccatctgtggcctgggggtccttcctgacaacgagggggtagccagaagagaagcactggattcctcagtccaccagctcagacagcacccaccggccccacccatcaagcccttttatattattttataaagtgacttttttattactttaattttttaaaaaaaggaaaataagaatatatgatgaatgatattgttttgtaactttttaaaaatgattttaaagagaccaaaaagaacctc

SEQ ID NO: 118 - DNA, 1385 bp, Homo sapiens
  misc_feature: Incyte ID No: 480187.81
ggaggtgcgaatgactctgctctctgtcctgtctcctcatctgcaaaattaggaagcctgtcttgattatctccaggaacctcccacctcttcattccagcctctgacaaactctgcacattaggccaggagaagcccccgagccaagtctcttttctcattctcttccaacaagtgcttggagctccaagaaggccccctttgcactatgagcaaccaggtgctctgctgtgtggtcctttgtttcctgggagcaaacaccgtggatggtggaatcactcagtccccaaagtacctgttcagaaaggaaggacagaatgtgaccctgagttgtgaacagaatttgaaccacgatgccatgtactggtaccgacaggacccagggcaagggctgagattgatctactactcacagatagtaaatgactttcagaaaggagatatagctgaagggtacagcgtctctcgggagaagaaggaatcctttcctctcactgtgacatcggcccaaaagaacccgacagctttctatctctgtgccagtaagagtctacagggggaaggtaccccctatggctacaccttcggttcggggaccaggttaaccgttgtagaggacctgaacaaggtgttcccacccgaggtcgctgtgtttgagccatcagaagcagagatctcccacacccaaaaggccacactggtgtgcctggccacaggcttcttccctgaccacgtggagctgagctggtgggtgaatgggaaggaggtgcacagtggggtcagcacggacccgcagcccctcaaggagcagcccgccctcaatgactccagatactgcctgagcagccgcctgagggtctcggccaccttctggcagaacccccgcaaccacttccgctgtcaagtccagttctacgggctctcggagaatgacgagtggacccaggatagggccaaacccgtcacccagatcgtcagcgccgaggcctggggtagagcagactgtggctttacctcggtgtcctaccagcaaggggtcctgtctgccaccatcctctatgagatcctgctagggaaggccaccctgtatgctgtgctggtcagcgcccttgtgttgatggccatggtcaagagaaaggatttcttgaaggcagccctggaagtggagttaggagcttctaacccgtcatggtttcaatacacattcttcttttgccagcgcttctgaagagctgctctcacctctctgcatcccaatagatatccccctatgtgcatgcacacctgcacactcacggctgaaatctccctaacccagggggaccttagcatgcctaagtgactaaaccaataaaaatgttctggtctggcctgacttctgaaaa

SEQ ID NO: 119 - DNA, 1582 bp, Homo sapiens
  misc_feature: Incyte ID No: 062042.4
  unsure 48, 62: a, t, c, g, or other
gcccagcgcccagccgggggctgcaagacgccagcagctgccagggancgccacggactggntctgggccggcctcgacccggacacggactacgacgtggcgctagtgcctgagtcaacgtgcgcctcctgaggccccagatcctgcgggtgcgcacgcggcccggtgaggcagggccgggggcttcgggcccggagtcgggggctgggccggcccccacgcagctcgccgccctccccgccccagaggaggccgggccagagcgcatcgtcatctcccacgcccggccgcgcagcctccgcgtgagttgggccccagcgctgggctcagccgcggcgctcggctaccacgtgcagttcgggccgctgcggggcggggaggcgcagcgggtggaggtgcccgcgggccgcaactgcaccacgctgcagggcctggcgccgggcaccgcctacctggtgaccgtgaccgccgccttccgctcgggccgcgagagcgcgctgtccgccaaggcctgcacgcccgacggcccgcgcccgcgcccacgccccgtgccccgcgccccgaccccggggaccgccagccgtgagccgtaagccggcgtccccgcccagccgagagggccggcgcctacctgagggcccctgtgtcccgaacccggagcggaggcgcccaacccggcagacgggtgcaggcccggcctttccccacgcggactccgcgcgaccccggccctctccctgcggccgcagggcttccccgcctggcgcctgccctccagggctggggcctcgcctggcgggaccccgcagcagccccggccccatccccgcccagagccgggcgtcgtgtgggtccgtgggtgataattgagagcgtcagacccaggactgttcagggaggagccccggtcagactcccacgtgtgaagaccgggccccaagtggcaagggctggcctggggcgggcagcttgggtcctggacgttgataggaagcggaaggggaatcgcgggaagctggcccaggtcaggtccgcaaaggcttctgaagaagaggaagggcgagtaggggcacctggacgctgatggtggccaggatgctcagctggccaggagggcagcacctgctggggacggtggccctgccttcatgcccaggacaccagctgggtccagctagcagccactgggaatcagaggaatggggcagagctgggcattcaggaccttgaggacacgtgaccccacccgcccaccgccactatcaggccccgggaccgcactgacaggaaaccttccgtcgtgagggagcacttcccaggggccgcagggacgacactctccagggaggccccagcaaccacaccatcttcttgctgtgagaggtctcaccccgggctacctcctgtcactactcactgccctggggtccgtgggcaagttgcccagggtgggggtgcctagccaggtgcagtccccgccccgcctagtcctcggcgtcacgcaatgctcacctcgcctcttccccactaacatcccagactttaaaattcagtaaatcagatgtacaccgagaaaaaaaa

SEQ ID NO: 120 - DNA, 1970 bp, Homo sapiens
  misc_feature: Incyte ID No: 1087696.7
  unsure 1513-1558: a, t, c, g, or other
gtcggcgagcaacgctgggagcatcccgctctggtgccgctgcagcccggcagagatggttgagctcatgttcccgctgttgctcctccttctgcccttccttctgtatatggctgcgccccaaatcaggaaaatgctgtccagtggggtgtgtacatcaactgttcagcttcctgggaaagtagttgtggtcacaggagctaatacaggtatcgggaaggagacagccaaagagctggctcagagaggagctcgagtatatttagcttgccgggatgtggaaaagggggaattggtggccaaagagatccagaccacgacagggaaccagcaggtgttggtgcggaaactggacctgtctgatactaagtctattcgagcttttgctaagggcttcttagctgaggaaaagcacctccacgttttgatcaacaatgcaggagtgatgatgtgtccgtactcgaagacagcagatggctttgagatgcacataggagtcaaccacttgggtcacttcctcctaacccatctgctgctagagaaactaaaggaatcagccccatcaaggatagtaaatgtgtcttccctcgcacatcacctgggaaggatccacttccataacctgcagggcgagaaattctacaatgcaggcctggcctactgtcacagcaagctagccaacatcctcttcacccaggaactggcccggagactaaaaggctctggcgttacgacgtattctgtacaccctggcacagtccaatctgaactggttcggcactcatctttcatgagatggatgtggtggcttttctcctttttcatcaagactcctcagcagggagcccagaccagcctgcactgtgccttaacagaaggtcttgagattctaagtgggaatcatttcagtgactgtcatgtggcatgggtctctgcccaagctcgtaatgagactatagcaaggcggctgtgggacgtcagttgtgacctgctgggcctcccaatagactaacaggcagtgccagttggacccaagagaagactgcagcagactacacagtacttcttgtcaaaatgattctccttcaaggttttcaaaacctttagcacaaagagagcaaaaccttccagccttgcctgcttggtgtccagttaaaactccagtggaactgccagattcgtctaaatgtctgtcatgtccagatttactttgcttctgttactgccagagttactagagatatcataataggataagaagaccctcatatgacctgcacagctcattttccttctgaaagatactactacctaggagaatctaagctatagcagggatgatttatgcaaatttgaactagcttctttgttcacaattcagttcctcccaaccaaccagtcttcacttcaagagggccacactgcaacctcagcttaacatgaataacaaagactggctcaggagcagggcttgcccaggcatggtggatcaccggaagtcagttagttccannnnnnnnnnnnnnnnnnnnnnnnnnnnnnnnnnnnnnnnnnnnnnttgtgtatatctttgtgtgtcttcctgtttatgtgtgccaagggagtattttcacaaagttcaaaacagccacaataatcagagatggagcaaaccagtagccatccagtctttatgcaaatgaaatgctgcaaagggaagcagattctgtatatgttggtaactacccgccaagagcacatgggtagcagggaagaagtaaaaaaaagagaaggagaatactggaagataatgcacaaaatgaagggactagttaaggattaactagccctttaaggattaactagttaaggattaatagcaaaagacattaaatatgctaacatagctatggaggaattgagggcaagcacccaggactgatgaggtcttaacaaaaacgcagtgtggcaaaaaaaaaaaaaagtcgacg

SEQ ID NO: 121 - DNA, 2916 bp, Homo sapiens
  misc_feature: Incyte ID No: 259805.28
gacggcccgggccaggcccgggatctagaacggccgtagggggaagggagccgccctccccacggcgccttttcggaactgccgtggactcgaggacgctggtcgccggcctcctagggctgtgctgttttgttttgaccctcgcattgtgcagaattaaagtgcagtaaaatgtccactaggaccccattgccaacggtgaatgaacgagacactgaaaaccacacgtcacatggagatgggcgtcaagaagttacctctcgtaccagccgctcaggagctcggtgtagaaactctatagcctcctgtgcagatgaacaacctcacatcggaaactacagactgttgaaaacaatcggcaaggggaattttgcaaaagtaaaattggcaagacatatccttacaggcagagaggttgcaataaaaataattgacaaaactcagttgaatccaacaagtctacaaaagctcttcagagaagtaagaataatgaagattttaaatcatcccaatatagtgaagttattcgaagtcattgaaactgaaaaaacactctacctaatcatggaatatgcaagtggaggtgaagtatttgactatttggttgcacatggcaggatgaaggaaaaagaagcaagatctaaatttagacagattgtgtctgcagttcaatactgccatcagaaacggatcgtacatcgagacctcaaggctgaaaatctattgttagatgccgatatgaacattaaaatagcagatttcggttttagcaatgaatttactgttggcggtaaactcgacacgttttgtggcagtcctccatacgcagcacctgagctcttccagggcaagaaatatgacgggccagaagtggatgtgtggagtctgggggtcattttatacacactagtcagtggctcacttccctttgatgggcaaaacctaaaggaactgagagagagagtattaagagggaaatacagaattcccttctacatgtctacagactgtgaaaaccttctcaaacgtttcctggtgctaaatccaattaaacgcggcactctagagcaaatcatgaaggacaggtggatcaatgcagggcatgaagaagatgaactcaaaccatttgttgaaccagagctagacatctcagaccaaaaaagaatagatattatggtgggaatgggatattcacaagaagaaattcaagaatctcttagtaagatgaaatacgatgaaatcacagctacatatttgttattggggagaaaatcttcagaggttaggccgagcagtgatctcaacaacagtactggccagtctcctcaccacaaagtgcagagaagtgtttcttcaagccaaaagcaaagacgctacagtgaccatgctggaccagctattccttctgttgtggcgtatccgaaaaggagtcagaccagcactgcagatagtgacctcaaagaagatggaatttcctcccggaaatcaagtggcagtgctgttggaggaaagggaattgctccagccagtcccatgcttgggaatgcaagtaatcctaataaggcggatattcctgaacgcaagaaaagctccactgtccctagtagtaacacagcatctggtggaatgacacgacgaaatacttatgtttgcagtgagagaactacagatgatagacactcagtgattcagaatggcaaagaaaacagcactattcctgatcagagaactccagttgcttcaacacacagtatcagtagtgcagccaccccagatcgaatccgcttcccaagaggcactgccagtcgtagcactttccacggccagccccgggaacggcgaaccgcaacatataatggccctcctgcctctcccagcctgtcccatgaagccacaccattgtcccagactcgaagccgaggctccactaatctctttagtaaattaacttcaaaactcacaaggagtcgcaatgtatctgctgagcaaaaagatgaaaacaaagaagcaaagcctcgatccctacgcttcacctggagcatgaaaaccactagttcaatggatcccggggacatgatgcgggaaatccgcaaagtgttggacgccaataactgcgactatgagcagagggagcgcttcttgctcttctgcgtccacggagatgggcacgcggagaacctcgtgcagtgggaaatggaagtgtgcaagctgccaagactgtctctgaacggggtccggtttaagcggatatcggggacatccatagccttcaaaaatattgcttccaaaattgccaatgagctaaagctgtaacccagtgattatgatgtaaattaagtagcaattaaagtgttttcctgaacactgatggaaatgtatagaataatatttaggcaataacgtctgcatcttctaaatcatgaaattaaagtctgaggacgagagcacgcctgggagcgaaagctggccttttttctacgaatgcactacattaaagatgtgcaacctatgcgccccctgccctacttccgttaccctgagagtcggcgtgtggccccatctccatgtgcctcccgtctgggtgggtgtgagagtggacggtatgtgtgtgaagtggtgtatatggaagcatctccctacactggcagccagtcattactagtacctctgcgggagatcatccggtgctaaaacattacagttgccaaggaggaaaatactgaatgactgctaagaattaaccttaagaccagttcatagttaatacaggtttacagttcatgcctgtggttttgtgtttgttgttttgtgtttttttagtgcaaaaggtttaaatttatagttgtgaacattgcttgtgtgtgtttttctaagtagattcacaagataattaaaaattcactttttctcagtaaa

SEQ ID NO: 122 - DNA, 483 bp, Homo sapiens
  misc_feature: Incyte ID No: 399128.1
  unsure 466, 470: a, t, c, g, or other
tttacaggcgtgagcaccgcgcccggcctcagtgcatatatttttaatatcttgtagttaccctgctgtatactgtcatcttagggaccttttaaacaataccagtatgagcgggacctaccctgctgctcagtgaccccaggcagtgtgtcctaaggtggtgtgtcctgaggcgtgcgacactctgtcctgtcccaggcactgtggtgggggcatccggtgtccaggtgcagaggcaaaagctgctcccgggtttcccagaaatggttccgaggcctgggtcccagagagccagtgcaggttggggggtggacctctggctctgtgggggggtctgttctgctccagtgggccgtgtctgccttgtcatcatccagacagccacagtggctcctgggtcccctcgtcaagcagcattttcccagtaacagtgacttcgtggaacacttaggaagcccttaaaaancatnctcggacctctga

SEQ ID NO: 123 - DNA, 3576 bp, Homo sapiens
  misc_feature: Incyte ID No: 986565.15
  unsure 189-206: a, t, c, g, or other
agctgggggttctgtagccggaggcggcggcgagtccagaacgtcctggccttacagggagaaggcgtcactcgcggttacaagtgcctgaccctcactccagttggcggaggaggagaaggaaggggccgggccgggtcccctcccctcgcgccccggatggatgtgcccggcccggtgtctcggcgnnnnnnnnnnnnnnnnnncactgtgctcctgcggaccgctcgggtccgtcgcgaatgctggttcttgccgaccgcgctgctctgcgcctacggcttcttcgccagcctcaggccgtccgagcccttcctgaccccgtacctgctggggccggacaagaacctgaccgagagggaggtcttcaatgaaatttatccagtatggacttactcttacctggtgctactgtttcctgtgttccttgccacagactacctccgttataaacctgttgttctactgcaggggctcagccttattgttacatggtttatgctgctctatgcccagggactgctggccattcaatttctagaatttttttatggcatcgccacagccactgaaattgcctattactcttatatctacagtgtggtggacctgggcatgtaccagaaagtcacaagttactgtcgaagtgccactttggtgggctttacagtgggctctgtcctagggcaaatccttgtctcagtggcaggctggtcgctgttcagcctgaatgtcatctctcttacctgtgtttcagtggcttttgctgtggcctggtttttacctatgccacagaagagcctcttctttcaccacattccttctacctgccagagagtgaatggcatcaaggtacaaaatggtggcattgttactgacaccccagcttctaaccaccttcctggctgggaggacattgagtcaaaaatccctctaaatatggaggagcctcccgtggaggaaccggaacccaagccagaccgtctccttgtattgaaagtactatggaatgatttcctgatgtgctactcctctcgccctcttctctgctggtctgtgtggtgggccctctctacctgtggctattttcaagttgtgaactacacacagggcctgtgggagaaagtgatgccttctcgctatgctgctatctataatggtggcgtggaggccgtttcaaccttactgggtgctgttgctgtgtttgcagttggttatataaaaatatcctggtcaacttggggagaaatgacattatctctcttttctctcctgattgctgctgcagtgtatatcatggacactgtgggtaacatttgggtgtgctatgcatcctatgttgtcttcagaatcatctacatgttactcatcacgatagcaacttttcaaattgctgcaaacctcagcatggaacgctatgccctagtatttggtgtaaataccttcattgccctggcactgcagacgctgctcactctaattgtggtagatgccagtggccttggattagaaattaccactcagtttttgatctatgccagttattttgcactcatcgctgtggttttcctggccagtggtgcagtcagtgttatgaagaaatgtagaaagctggaagatccacaatcaagttctcaagtaaccacttcataatatactgctgaagggcttcttcttatagcaagaactctgcacagcaactgcctggatgtatttgattttttaaagcgtagacatatatttatgaatgtgcatttcttgacttcacagcagccacttgactaataccttgtgttccgggaataacatgatactattcagaggagccagaagtaaagtttatttcatggattatttatgagagctaatttaaggatgactttttttctgattcaaaagtgaacttgattttaaaaaccagtcaagagcaatcaaagcagcacatggtgttgtatacttcattagcaagtgagtttggtgttttataggtcacatatgtctgtatctacttagccagatgcttggcctggtgggaccagggctccacagaggccacaaaatgttgcaagtcatgatggatggaaatatgttctaacagcatctgcctctattcaatttaattcttatttctgtgttactcatgtacattggtctttctacatagttattctatcactggcaatatttgttctggtttagtgttctgtattttaaggtgtacgtatcatttctaattttaagttattttaaaaaaattcatcatatgaatgttcttggttcccattgtgacgattatttatttctgtaaaatttgtttagaagtacgtttttgcattattcatatgcttcccagagaagctcatttagttagaaaataaggcaagttttgaagcctgctaaatgaagagacttaagaaagcttaaggtacgcttgcttgtctttaaatcttcaatatgaaggactattaattccaagattaaaagttcatatataggctaaagatgtaactaggccatttgtatttgtattcccttttatttccaaaataaaatgaaaaatctttttttaataatttcatccctatttatagtttttatattaatttgtttttcttatccaagtaaagatgtcaataggaattgcattagtccaaggcctttttcataaactgagcctcttttcaattatttcaatgggacaggaactaggatagatgtgattcctgcatttttttaccttaaatctgcctttgtttctaaaggtagatcatcttgaatatttgcttaaaattgctagtgatttcattaccaagttacttgaaaaaatgttctatatgcatttaattctgaaatcagtctaccaaggggctgctagtatatgtcagacatgaaaactattttaaagctgactttgttgccttatcttgaaaagaatctagataggtgcttttaactggggtattaacttttttagaatgacacagctgaacagtgttaataatagtgtgtcaagattgcaaagtcgacatactcatttggtttaagcaggaatcctagaagcaaatggatggggataagaataggtcattttctattcaccatcctttactattaagggaaaggaaaagaacactagctaaggaagggaaagggaagtgatatcataaaagtagcaaccttcattttacattctgtctgtttttctttttttgctttgttttgtttgtgctaatttgggaattgtgtactccgaaacaagtagaaaagtgctgtttgagggattttattaaatctttttttaatggaatgtggtacaaattgttcatgttaccaaagcaatatttccctggaatttaattcaaagtttgtggcatacaacctgagccttttcttatataagacaagaatatgttcacatcttggtatgtggccatatttatagaatgctgaactcaatgtgcaagttgtactgtatgcagttttgtaaataagtgaaaataatttgttgtactttttattcaattctgtatagattataaaattatttttattaaataaatattttacagtatattt

SEQ ID NO: 124 - DNA, 1039 bp, Homo sapiens
  misc_feature: Incyte ID No: 978378.3
  unsure 573: a, t, c, g, or other
gtgaggtgctgcgggagccaggccccaggctggccgggagtggcccctcacactggttctccccactttctctgcctgtggcatcgaaggccccgggcaccatggcccaggccctgggggaggacctggtgcagcctcccgagctgcaggatgactccagctccttggggtccgactcagagctcagcgggcctggcccatatcgccaggccgaccgctatggattcattgggggcagctcagcagagccagggccgggccacccacctgcagacctcatccgccaacgggagatgaagtgggtggagatgacctcgcactgggagaaaaccatgtcccggcgggtacaagaaggtaaagatgcagtgccggaaaggcatcccgtctgccctgcgcgcccgatgctggcccctgttgtgtggggcccatgtgtgccagaagaacagccctggcacctatcaggagctggcagaggcccctggagacccacagtggatggagaccattggcagggacctgcaccgtcaattccctctgcacgagatgtttgtgtcgcctcagggccacgggcancaggtgctcctgcaggtgctcaaggcctacaccctgtatcgaccggagcagggctactgccaggcccaggggcccgtggctgctgtgctgctcatgcacctgcccccagaggaggccttctggtgcctggtgcagatctgtgaggtctacctccctgggtactacgggccccacatggaggctgtgcggctggacgccgaggtgttcatggccctgctgcggcggctgcttccgcacgtgcacaagcacctgcagcaggtgggcgtcggacccctgctgtacctgcccgagtggttcctgtgcctcttcgcccgctccctgcccttccccacagtgctgcgtgtctgggatgccttcctcagtgagggtgccagagtactgttccgtgtggggctgacactggtgcgcctggcgtgggcactgcagagcagcgaggggcctgccctggcctcctggagacatggga

SEQ ID NO: 125 - DNA, 1128 bp, Homo sapiens
  misc_feature: Incyte ID No: 979575.2c
  unsure 434-458: a, t, c, g, or other
gcaggtgtaagagatttattacaaaacaaaaactccccttgccagccttattactctggctcatcattaaaatccagtgctagccatattacatgcccatcttaaaacttttatcctttagttacaaaaagaatactatgtagcttacatattcagaatttacctactaccccaccacatcaaagtccataaggtaccatatactcttccccgccccatgcttcatgggatgttattacagtatggtgctttacagcgaaaatgagagcagtcacttaagcggcttactgagacccaggcaatgttctaagcagctacacacagtaactcctaacaaccttaggaggcaggaaccaaaagctgaagcatcatacaacttgcctccaactaagaggggatctggggttcaaacccaggcagcctgacatgagcgnnnnnnnnnnnnnnnnnnnnnnnnngctaagtaaaaagtaggtttaagggaagaatcatttatagtaacactgaattaagtaagggtttgtaggtcacagaatcagactatttagggctgatacttcaagcatatctcaattaacaaaaaagcacattgagactccaaggatgaactgcctttgcttagtggccagggcactgtcaagacccagaggtctcctaattcccacgctagcacaccataccacccctttgttcaacctcacagaattgccaatactagcgtatcaccaggaatacttacgaaccatactaactcacatggaagaatggcaaatgaaaactggcccacattttcttgttccttcttcaaagagtaatagggttctacctaattgtgaactagaagctggggatgaaaaacaagccagatacagagctcacagtccagaaggagatgtcaacaagatgacaggctgccatgggtactgacagaagtctacataagggacagcaggggaacaaaaaaaggcacagtcaaaacatctttgactgcaatttggagactttaaacaaggattatcctttctacaggcatactgaattttctttttaatgcctcactgtgcctattaagcaaaatccgtaatacaacacaccagacagaagccttaccctgtgagccgggcgcag

SEQ ID NO: 126 - DNA, 1414 bp, Homo sapiens
  misc_feature: Incyte ID No: 233594.4
  unsure 512, 515, 522: a, t, c, g, or other
ggaggcggaggcccgggagttgggccgggacgggatccgggaggcttctgagccggagcaggcagcgcctggaggccagaggccgtttcgcccgcctcaggccggtccggccgccgctcccctcccctgcgccctgttcccggcagggccagagaggccgccgcctccgcccggtggttctcgggcgaagggaagccgcgaacaggtcctggggaagagctcgcctgctcctgagggaagcagcgataagatggcgctttgaaggggagccgaggccgagtcactctgctcgtcgggacgccgcctttctaacgccgccgtcggctcgcaccactctgggcctgctgcccacactgactgcggggtccgggagagcgggatgctggccggccgcgcctggcttcttggaaagagcaggaaggagcgcgagaatgcagttccgcggcaggtgctcatcccagcagcttcgggctctcggttgtggtttttacacctatgacaaatgacatggncanacacacnataatgtctgaaggtacagtagccctaagcgcctgctcgtcacggaagagactgtcttgagagcacaggtctgttgcagcgtgggaaagcctgcgttaccactgcgcaatggctagactgaaacgtgcgcctttgcagtggatctcccagctcttctgagggagagggatttgaatcttgttgctttagtagcatcttctggaaggaggtcgtttacgtaaattctgttccaaagctctgtcgtaactgcttctaaaaatggaggttgatactaaacctctgtagaggagcaggatgcaacccgacaggctgtggcccggacagctgctttcccgctcttgccgtctcaggccactctggctggccgctgggtccctcaacatcccctgttggttcctttagcccagcctacaccgctggaaataggccctttatgagattctcttctaaatcctagaagagtgtaccctccatttcctgaagaatcctgacaaccaaaaatcaggagcagactatgtatacaagtctggaatggaggactttccattctagaagaaagagtggccattttcaactcttcttccttttgagacctcactaaagttagaggaacagaatttaaaaatacattacatctccatgataaagagaacaggaaaggaaatatcaacagacaaggggatttgacagatatttttggagggaagaaacggtggagcagaggtaattaagccgattggagagaggctgtcctgcagaccgagtgagacaaggtcctggcactggagaggctgctgcctggatccctcccccaacacaagaaatcaggaaatcaccactcctcttgccccaggccagagactaggtttctgtagacatggaaggtagaggc

SEQ ID NO: 127 - DNA, 924 bp, Homo sapiens
  misc_feature: Incyte ID No: 238635.1
ggagaatgttctaaatttgactctgagatctctgaggatgcagcatggccccaagacactttctgttggtcactctatccacagagtcagtggctcagccctccatccaagccagcagcaccacagtcacagagaagggctccgtggtcctgacctgccacacaaataacactggaacctctttccagtggattttcaacaaccagcgtctgcaggtcacgaagaggatgaagctgtcctggtttaaccatgtgctcaccatagaccccatcaggcaggaggacgctggggagtatcagtgtgaggtctccaacccagtcagctccaacaggagcgaccccctcaagctgactgtaaaatcagatgacaacactctaggcatcctgatcggggtcctggttgggagtcttctggtggctgcacttgtgtgtttcctgctcctccgaaaaactggcagggccagcgatcagagtgacttcagggagcagcagcccccagcctccacccccggccatggaccctctgacagctccatctcctaggaattgctacactctgacacaaacatttactgctggatcgaccacaaagcagatgtggcttcttaggttcctctgggagctgctcctgtgggttgatggagcgtccctgaagcccccagccctggggatggggaaggacatggagcctgagccagagaaccagctctgagtcctgaggagacacaggcctggggacaggaagggatgggggtccctgctgaatatatagagacctcaacagactgccccgggctctgggtgggccaaggcgaaggcttcccatcaccacaggaagtgggggcttgcagggaaagtgaatgggcctatggcccacccggggtcacctggaaaggatctgaataaaggggaaacttcctctcaa

SEQ ID NO: 128 - DNA, 2651 bp, Homo sapiens
  misc_feature: Incyte ID No: 1080496.1
cagggtatcagctttcccagcctgacgctgcctccaggctggacactgaggaactccggttggtggaaagagatccacaaggaagcagcctcccaggtgaggttgggttgaattggtgttagggccgggtggggtttgctttttcttcagaggctgagggggcccctcccagcgccatcagccccagcaaagacctcagcattgactgcttcaccattctcccaccaccgtgtctgagtgaggcaggaatccagttacgtccatggtctcttgctgcatgacagaccaccccaagacttggtcggtggaaacggcagtggtgttagttgccaggatctgtgtatgactggtcccgggggtggccgttctgccccattggaggctctgtgccagcacaccaacaagaacacctagaggcggacttgggctggagggccctgggtgcctgtcgccagggggcttgtcgctggggggtttggccttagctattgaccccactctcttcgctggcagccgggcccctccctccaggagggtgcgctctgagcaggctctccttgcatcgtgcatcttgtggccaagctagtggccaggtggagacctccaaaggcgcggtttccagaacccgggctcagtggggctgtccttcctgtcctgtcggtggcctccgttgttggaggcctccaggtcccacatctgcagcagcaggcgtggggcatgcgctgcagggctgcctgggagggacagcgctgcttccaaacagccgtgagccccgcggggatccagagcccggagccctgtgcgctgttccggcagctgaggctcggctgggtcctcctctccctggccctgggcggggcgctcacgctagggctctgaccttgttccagaaggcgggaggcggcaggagagcgctgggtgcgcctgcgaggaggccgcccccgcgggggtgctgcctgagctgcctacggaggcgccccctggggacgcccttgccgatcccccgtcgggcaccactgaggaggaggaagagcagcctgggaaggccccggacccgcaggacccccaggacgcggagtccgactctgccaccggatcgcagaggcagtccgtcatccagcagcctgccccggacaggggcacggcgaaactgggaaccaagaggccgcaccccgaggatggggacgggcagagcctcgagggcgtctctagctccggcgacagcgcagggctggaggccgggcagggccctggggctgacgagccgggcttgtcccgcgggaagccctatgcctgcggcgagtgcggggaggccttcgcgtggctctcgcacctgatggagcaccacagcagccatggcggccggaagcgctacgcctgtcagggctgctggaagaccttccacttcagcctggccctagccgagcaccagaagacccacgagaaggagaaaagctacgcgctggggggcgcccggggcccccaaccgtccacccgcgaagcccaggcgggggctagggcgggcggtcccccagagagcgtggagggcgaggctccccccgcacccccagaggcgcagaggtgagccgctgtgctgtcccgttccggaggggccgctttgccggccgtgaatcccagacgaggcattgggcctttccacgcccctgggtggcggcttcctgtggtgtttgtggacgtcctctgcctgtgccctgaatccgctcctgaggctaagcgctcccaacgagaagggtccacgggaagccctcacctctgtaaacacaccctgggccagcgctcgcatccgaggggagccgccggatgtggaagaagactcggctttcctgcagccatttagtgccgccccatgctaggttatttgacattgtgcagtgtagagttgccttaaagtgcgtgatctgccagtgctttcttcaagtcacccttgccccgattcctcctgtttgcgctccccagggttgctcaagtggaaattttgtcagctgtttagccttttcgtacttggcgtgatgtcaacttcacttctaatctgcaaaagcagaagctgtttcctagtttacctcgcgtgtgtttacctatatggagtagctcgcagagatcacagaaatgcttgcagcctaaggcagggttttcagaccgtgggtcccagcccatttagtaaaatgggaaatcaattagcaagtggtcaccagcattacacagcaatgaagcagaataaagtaggccagaatgcatcatgtagtaaaggcaaatactgttttgtgaaacttttcacccatacatctaaatgtgagaactggttgcaatgtaagacatttcttgctgggaagttgtgagcaaaataagttgaaaacactaataaagatctgtctgtctgagcaaaggagactaaactccttgggctacataaggtgatcttttcattgattgcatttattctcaagattacagtatcattcccattgcctgcgcataaacttaactgctccctgcgcataaacttaactgctccctgtagatacagaaactggtgcctctttttctgtcactgtgtttgagcaggcagtctgttgtaatgacccccaaatcacagagacttagtaagtacttattcatgggccgggcgtggt

SEQ ID NO: 129 - DNA, 1048 bp, Homo sapiens
  misc_feature: Incyte ID No: 351204.2
gattggctataagaggagcttgaccgtgggtgcaccctggaccccaccatggctcaccggccccccagccctgccctgggcgtccgtgctgctggccttgctgctgagcggtgctgcccgagctgcggagatcgtgggcgggcacgaggcgcagccacactgcccggccctacatggcctccctgcagatgcgggggaacccggggcagccacttctgcggaggcaccttgatccaccccagcttcgtgctgacggccgcgcactgcctgcgggacataccccagcgcctggtgaacgtggtgctcggagcccacaacgtgcggacgcaggagcccacccagcagcacttctcggtggctcaggtgtttctgaacaactacgacgcggagaacaaactgaacgacgttctcctcatccagctgagcagcccagccaacctcagtgcctccgtcgccacagtccagctgccacagcaggaccagccagtgccccacggcacccagtgcctggccatgggctggggccgcgtgggtgcccacgaccccccagcccaggtcctgcaggagctcaatgtcaccgtggtcaccttcttctgccggccacataacatttgcactttcgtccctcgccgcaaggccggcatctgcttcggagactcaggtggccccctgatctgtgatggcatcatccaaggaatagactccttcgtgatctggggatgtgccacccgccttttccctgacttcttcacgcgggtagccctctacgtggactggatccgttccacgctgcgccgtgtggaggccaagggccgcccctgaaccgcccctcccacagcgctggccgggaccccgagcctggctccaaaccctcgaggcggatctttggacagaagcagctcttccccgaacactgtggcgtccgggacggccccacccgtccccccacactccctcccacggggctccgggagacaggccggccctgcacctcaccccaccgtgacctcaataaacgttgaaactccaaaaaaaaaaactcgagccg

SEQ ID NO: 130 - DNA, 4253 bp, Homo sapiens
  misc_feature: Incyte ID No: 235394.5
  unsure 4049, 4068, 4073, 4079: a, t, c, g, or other
ggagacaagccgctgctggggggcgacgtgtcggcccccgaaggcacgaaggatgggcgccgtgcgcctgccgccgggctcttctgctttgcaacgggatgaggtacaaactgtctgcaggagggcgacattcaggtctgtgtcatccggcacccgcggactttctcagcaagatcctcacctcgaaattcctgaggcgctgggagccgtaccacctaacgctggccgacaacagcctggcgtccgccacgccaactgggtacatggaaaactcagtctcctacagcgcaattgaagacgttcagctgctgtcctgggagaatgccccgaagtactgtttacagctcacgattcctgggggaactgtcttactgcaggctgccaatagctacctgcgagaccagtggttccattctctgcaatggaagaaaaagatttacaaatataagaaagtgctgagtaacccaagccgctgggaagttgtcttgaaagagatccggaccctggtggacatggccctgacatcccccctgcaggatgactccatcaaccaggccccactggaaatcgtctcgaaactgctctcagagaacacaaacttgaccacccaggagcatgaaaacatcattgtggcaatcgctcctttgctggaaaacaaccacccaccaccagatctctgtgaattcttttgcaagcactgcagagagcggccccggtccatggtggtcatcgaggtgttcacccccgtggtgcagcgaatcctcaagcataacatggactttgggaagtgcccgcgactgaggctgtttactcaggagtacatccttgccttgaacgagctcaacgcggggatggaagtggtgaagaagttcattcagagcatgcacggcccccacagggcactgcccccacccccgggtcctgcccaacctggtggccgtgtgcctggctgccatctactcctgctatgaagagttcatcaacagccgcgacaattccccaagcctgaaggaaatccggaacggctgccagcagccgtgcgaccggaagcccactttacctctgcgccttctgcaccccagcccggacctggtgtctcaggaagccacgctgtctgaggcccggctcaagtcggtggtcgtggcctccagtgagatccacgtggaggtggaacgcaccagcactgccaagccggcgctgacggccagcgcaggcaacgacagcgagcccaacctcatcgactgcctcatggtcagccccgcctgcagcaccatgagcatcgagctgggcccccaggccgaccgcacgctcggctgctacgtggaaatcctcaagctgctgtcagactatgatgactggagaccgtctctggccagtttgcttcaacccattccattccccaaagaagctctcgcacatgagaagttcaccaaggaactgaagtacgtgattcagaggttcgccgaagaccccaggcaagaggtccactcatgcctgctgagcgtgcgggccggcaaagatggctggttccagctctacagccccggaggggtggcctgcgacgatgacggggagctgttcgccagcatggtgcacatcctcatgggctcctgttacaagaccaaaaaattcctgctctccctggcagaaaacaagctgggtccctgcatgctcctggcactgagggggaaccagaccatggtggagatcctgtgcttgatgctggaatacaacatcatcgacaacaacgacacccaactgcagatcatctcaaccctggagagcacagacgtggggaagcgcatgtacgagcagctgtgtgaccggcagcgggagctgaaggagctgcaaaggaaaggcgggcccaccaggctaacactgccctccaagtccacagacgctgacttggctcgtttgctgagctccggctccttcggaaacctggagaacctcagtttggccttcaccaatgtaaccagtgcctgcgccgagcacctcatcaaactgccttcgctcaagcagctgaacctgtggtccactcagtttggagacgctggccttcggctcctgtcggaacacctcaccatgctccaggtgctgaacctgtgcgagaccccggtcacagacgctggcctgctggccctgagctccatgaagagtctctgcagtttaaacatgaacagcaccaagctctcagctgacacctacgaagatctgaaggccaagcttcccaatttgaaggaagtggacgtccgctacaccgaagcctggtgaagctcccagctcaaggcaggaagacgtttgcaaccgcgacaaaataactcttgactaacagccgcagagcagccggtcctggggtcccaccctggtgccctggctgtgagatagatggggagtctttctgggggcggaggggggagggggtggggagggggcccacaagcacgcccagcccccgccgaattcttttagcttcgtaattggaacctttgacctgatctaaagtggactttgtagcaacaagaggagcatcagcgggtcggggaggggtttgggggtgggctggggggtgggggaccctttgtggattttctttgcctttgtgtttgatgccgtcgtgtgggaaaagtcaactccgatgccaccattgcgggccggacgaaggatgctttcttcctagaggctccgagctgagctgcgaactcgccccccgcccttgggacaagaagacccagtcacatcactgcacccgtcctgtgtcctcaccattgctatgcaaagtgattcttgttgtacataagatttaaataatgcacctatttaagacatgttgacaaattgcgggtctgggacccgcctcttatttatgaagtctttgaccgtcccccccgcccgaccccaccgccctcccgcccccacctggcgtgtagtactgtataaaccagtcagctgtcgggttagtggtagtattattgttatttttttaaaggaaacaaacagacaacaaaaagaagaaaaaaaaaagaacctccttggaaaaattaattgctttttcgtaatggattctctatgctaatgctctctcgtctgtcctgtctgtctgcccactcccccacccaccactgtgcgtttctgatttccaaatgtctccaactccctcacgaggtggggctcaggctggaggaggagggattaagatccccttgctccactaaggcccaagctctttctctcggcaccttttagacttgaatgggaggctgctaacccgccctctccagtccaccccggtaaaagagctgttccccacccccagggagctcctgtccctgtcagcctttgctgtcccctgtccccaacggagactctgtcacccctgggctccccctgccatcgtgtgcttcacgtggccccatgcatgcccgcctctctgcatggtctcttgggaaaagagagatgtgtcgcctccgccagtccgactgccctccccaccccacccccgccaccccccacatgtgaccactgcaacgaagacactccttctgtccccacctgctccgaagacaaaccaacctccgtttcttttataaacagtcggctttttcttaataagccctcactgtacagaacagcccgttgatggtttatttggggtccccctctccccccagcccttttttctgttggtttagcacaaatacttccctcctccggcacctccaaacctaccccacagtcagtgtacttgttttatatatatttaatcttattcaatggaaaccatgcttttgtcgttttatactttgctaggtagactttattacccccccactatgccctcatttttttaaaaaaggaaaaaaaaaagaaactgggttccagtcttaattcattttccgtgccaggttttatttcgtgtgtgtgtgagtgtgttctgttttgtgttttgttttttgttgttgttttcagttgtttggttttcttttctttcccccctccggtcccatacttcacagcactctggtgcgggaagaagcagaagcaaaaanaataaaaataaaaaataantaaanataaanaaaataaaaaaggaaaaaaaaaaagaagaaacaagacatgccacctttcccctcgcactgttgcttttcctgatggttaatactactgtcacgtagctgtgtacaaagagatgtgaaatactttcaggcaaaaataaactgtaagtgactcatcaatgtctggcctttgtgtgg

SEQ ID NO: 131 - DNA, 2364 bp, Homo sapiens
  misc_feature: Incyte ID No: 403242.1
caagaatggaagaatgggtaaagtctacagtccatttctagaactggtcatgagaactcatgtttatgatgatggacttttgatctggtggagggacccaaaccttcagttctgaagctcattagtggtcctacctgtgtgacaggcatttactattggactggcagtcccaggacaaactccaggaatccccccatgtccatctctactcctgccctcttttacgtagcagcaatcatattttcccttgatagggttcatcattctagatactccgatgacttctttataatgagcctgaagtggcctggtggctgcctcagcttccagttcagttgaatagctactacgtctttgaggatgtgctccttgctgggggactaaactctccacgccagcccagtcccaaacctaaacctcgggtatgagaaaagcattgagatctagcaatagcagggccatgtccacactgcgtcctatccctgaaggagaaacagcgccaggtatggttgccggctccaagcgcatgctgcctcctgcaggcctgacccagcctctcggggtgttgtttctggtgccatagttgaattttcaacaaaccatttcaccaccctctcaagacagctgctgctggtttgtgggttcctgacaagatgagtgaatgcctgcccatcaacccgttactcttcttttagctgtaaagtgaattctctggttgggtgcagtatgtgaggaggtcacatgatgtttatggcatttgagaattccatggatattgatggcaggagaggcatgatgggttagaaaagcaaatccaaatccagaacaagggcccaaaagggccaagacaaattactgcccctctcagagccacaggtgtagacaggtgaaaacactggacagtgagtgagctacccacacacgacccactggtgccttcagagccttagcctggagcgacagtgtaccgttgataatggaacgcactggccatgccagactttatggctaggcggtcagataacactacgaggggcagcatggccaccaagtgtgccagggccaagtgttcaggctctcccagagcccagtggtgagccagaagggcattttgtacaaggataatggttactttttggccagagcatcacttggctccaaatcctgggttcccgtatcatattttcttgtcaggacttaccgcaagctatgtatggctccgcggtatgccacccatggaaagacacctcatgcaccattgacctgccaggtcacgtggcctgatggcagcgtcggctgcacaaaagactttcccagctgcaatgccttcgcctgctctaggcccaccccaaagctggcagccttctaggtcagttggtaaatgggttagaacaagatgccccaaagtggcataaattgcatggaattaggccttagtggcgagggattcgacatacagtcatttgtcctacattgtgaaggaaacattctgacctcaaacagatccctcaaccccagaactttatagaaggggcagaccttggcattttcacatgatttatctcccactctgattcacatatgtttgaccaaggcactgggcagctgccaatttcccgtcccttctgtagtcccagatgaatggatacagacctctttggggaaggctgcaaggaaggttcacaacatgcatctaagtgttaaaataagtttttccttcaaaaatacatttgacttcctctccatttaaggtctggaaatcaagtgggagatcttgactttaccttggcacttgagacagaactgttggcccagaagtctttagttaaggtcattactaggccatatcttaggggcgtctggcctttttcattcctgggacccacagctcgaggtctggtttccatgccctatcccttacgatgagcgccctattttgttccttctgtctatctctgttgctgagatcagggagcccacgttcacagcagctctttcaagcagcctcccaggcctagagaggaaaatcagcagagcctcgtgaatgtatttctcgtggcaagaagggagctcatcttctgggtcctgccagagggcagtgagggggttgatgggctgggtgcatgccagggacccaatcaagcatttttatcttctgaaatctttgaattcctgcctttcttggatgtttggtcttttgatataatttagcatgggccaacatttggtccagatttgtattagccaagccctcctaaaatagtaataacagtatctggcgatttgagcttttacgtagaatgtagaatctctggtgagtgaacatatcaataaagacaacctgaaccaaaaaaaaaaaaaagg

SEQ ID NO: 132 - DNA, 1067 bp, Homo sapiens
  misc_feature: Incyte ID No: 427529.9
cgcgccgagatggccgcgctcctggccgcctagagccggagcggcccgcggagctgcggaggcagcccatggtcggggcgctgtgcggctgctggttccgcctgggcggggcccgcccgctcatcccgttgggcccgactgtggtacagacctccatgagccggtcccagggtagccctgctgggcctgagtctgctgctcatgctcctactgtatgtggggctgccaggcccccctgagcagacttcctgcctctggggagaccccaatgtcacagtcctggctggtctcacccctggcaactcgcccatcttttaccgcgaggtgctcccactcaaccaggcacacagggtggaggtggtgctgcttcatggaaaggcctttaactctcacacgtgggagcagctggggcacactgcagctactgtcacagaggggctaccgggccgtggcccttgaccttccaggttttgggaactcggcaccttcaaaggaggcaagcacagaggcagggcgggcagcgctgctggagcgggcgctgcgggacctggaggtacagaatgccgtgttggtgagcccctcgctgagtggccactatgccctgcccttcctgatgcgaggccaccaccagctacatggatttgtgcccatcgcacccacctccacccagaactacacccaggagcaattctgggctgtgaagactccaacccttatcctgtatggagagctggaccacatcctggctcgagagtcactgcggcagctccgccacctgcccaaccactctgtggtgaagctacgcaatgcaggccatgcctgttacctccacaagccgcaagacttccaccttgtcctgcttgccttccttgaccatctaccttgaactaacccactcccagctcccagcctggcatgagcttggacagtctggaccgccaccctccctgaaccagggagacagcctctgggattggaggccagaggccagggtcagacccagccaggactcctcatttcatctcacagacacaataaaaaagcatatttgtcctgcctgggaagtg

SEQ ID NO: 133 - DNA, 2458 bp, Homo sapiens
  misc_feature: Incyte ID No: 474868.2
atcatctagtccaaacctttcattttacagatggggggacgcaggcccacagaacaggcatgacctgctgaaggttacccagggagtcatttagggattgcaagatcatcaggaacagggctggggcagaagagaaggcatcaagtcttggccctgggtttctttcagaaacaaggagaccagtgctggtccagtggctgtgatgggaaaagattattacaagattcttgggatcccatcgggggccaacgaggatgagatcaagaaagcctaccggaagatggccttgaagtaccacccagacaagaataaagaacccaacgctgaggagaagtttaaggagattgcagaggcctatgatgtgctaagtgaccccaagaaacggggcctgtatgaccagtatggggaggaaggcctgaagaccggcggtggcacatcaggtggctccagtggctcctttcactacacctttcatggggacccccatgccacctttgcctccttctttggtggctccaaccccttcgatatcttctttgccagcagccgctccactcggcccttcagtggctttgacccagatgacatggatgtggatgaagatgaggacccatttggcgctttcggccgttttggcttcaatgggctgagtaggggtccaaggcgagccccagaaccactgtaccctcggcgcaaggtgcaggaccccccagtggtgcacgagctgcgggtgtccctggaggagatctaccatggctccaccaagcgcatgaagatcacaaggcgtcgcctcaaccctgatgggcgaactgtgcgcaccgaggacaagatcctgcacatagtcatcaagcgtggctggaaggaaggcaccaagatcaccttccccaaagaaggcgacgccacacctgacaacatccctgctgacatcgtctttgtgctcaaagacaagccccatgcacacttccgccgagatggcaccaacgtgctctacagtgccctgatcagcctcaaggaggcgctgtgtggctgcactgtgaacattcccactatcgacggccgagtgatccctttgccctgcaatgatgtcatcaagccaggcaccgtgaagagactccgtggggagggccttcccttccccaaagtgccaactcagcgaggagacctcattgttgagttcaaagttcgcttcccagacagattaacaccacagacaagacagatccttaagcagcacctaccctgttcctaggctctgccccagccagtccagagcctaccacagcaatacccccaacactcactccactcaatgtgcacccagcttgatgtccactggacactggcaactttttctaaaatgcaaaaaaaagccactggttttcaggaaaatgttcctgtccctgaccccttttagagctgggctgcctggggggagtgggagggaggtggggagagctagcccaggccaggggtcaatgttcatgtcactagctttcaatccagtttccactgcagtggctggagagtgacctgagtgctacttgaagatatgtagagattccttatccatgcctgtacatagcatgtcctcctcccctcagctttgctaataccagtcccctcccttccctttggcttcctgctgttgggggtggaaaagactagaaaggacattgctttctcagccccacccccaggtccacagtgtccaaggtaatggcacacatattcatgcacaagaagcactcacctagagctgtctgtgcctctctgggagaaaggagagaggataagaagggaaagttcacaacctgtgaacagggacttgagcacgagacacttttcatctggagcaggggggtgagctcctcagcagcctccgtaacagctgccctgcctacacctgcagagctggaggttctgtcctccctgctgctctcaggagtgttcaagggtggagggcagggaatggggcctgaggtattaaggctaagaggtgggggacagggcccatctaccagccttcatcaggaagggaaagggctttggggtcaggtggcagctattccccaccaagagattcagggtcacaggtttttccccacacctctgaactcagggcctagccacccccaaacttccaaatcccacttttgtgatatgtgaagctactcatttcttacccttggaggctgtgtggggaatttccagcccttttatgcctgtgtgatcccaccccacccccatagttgtataaaggtcatagtgaagaagctgggggaagactgcttcagccagatcctggggtggggtctttaggttttctcactttgacaacccccgaatgtttttatagtagtttttttgtatttttttgtaatgacagtattatgtaaaaaataaagtattttaaaaatatggcatctgagcaggagcaacaaacctgggatggggttgt

SEQ ID NO: 134 - DNA, 613 bp, Homo sapiens
  misc_feature: Incyte ID No: 1095839.17
  unsure 584: a, t, c, g, or other
ctaaaagaataattgatgatacatttcctttcctgaagtctagaattaattgaaaattacttaaagttacttagaaaatatttcaacaagcaattctaaatctcttttagagcaattgtatgatggctatgatgaagagtatgactgtcccattttagatgaagacagagtagttgatgagttagataaccaaatgagagaaggtggagttattgttgattaccatggttgtgatttcttccctgaacgctggtttcatatagtttttgtgctgagaacagataccaatgtattgtacgaaagacttgaaacaaggggttataatgagaagaaactaacagacaatattcagtgtgagatttttcaagttctttatgaagaagccacagcatcctacaaggaagaaatcgtgcatcagctgcccagtaataaaccagaagagctagaaaataatgtagatcagatcttgaaatggattgagcagtggatcaaagatcataactctgacttataaggctagctacttaataatcactcttgttgatatctctgccgacatcatagaaattgttcaagtgtcagtnacacttattaaaatcagttgcagaccagc

SEQ ID NO: 135 - DNA, 3606 bp, Homo sapiens
  misc_feature: Incyte ID No: 1095839.1
  unsure 1789-1790, 1918, 1926: a, t, c, g, or other
tgctgaagtaccactgaatgaaacaaaaatgaagctgtgaagtagcaatctgattagcaggctggcttctatgtcccatcactctcgtagtcttctattattatgttttcttccatgtctccttgggctgaaaagggctggggctggctagcaggcagttcactggcactattctgactcaaaggaagagaccaggtttccggcacagtggcttgagtgggttcacccagagattcctctgcagaatgtcctccattaagctgggcttcatctccgctgtcagggtctatcattccatgttccctgtcagtcagggcttccattttcaatcttccaaagtgtcgcttcagagggagccttccaatatcttggataaaagaaatctgagcttgatttctcattggaatggttagtagagcaaggtatggcaatagctgagtttggaggcataaagctggtaggcagaagtcaggaaaaagtgcttttgctgccaggcaattttcccgatactttttatttattagaaaccactgaggtttgtgcaagggtcgaaaacttgatcctcctccttggcaatgagcatatcctcgggctttgttggaatgcatcacacctctcgtagctatagatgtgctatattccctgagtaaagagcgtgtattccagtcaccactgaggatatctgcaaaactcagaaattcactggctctcacaatatcatcaatttccatgaagaaatctatgtagttttggtgaagatataaattaaataagtctccaggcatgtgtgacatttctactacctcctcaggttcaacaagtaatgtatcccgttcatattctgataaatgagagggcaaccgaggtgagtctaattctgttaaagatgctcttttacaatatagaattttccccaaagctctgaagagaaacagagaaacatctttgccaccaatagcttggacctcttgattttcaaaaaccctatcaggtttttttcttcgttttgattttgacagcacagcatctgattttaaagacattccttttttccttggccgtaagttgttttctccttttgaagaagaaaactggaggctgtttattgcacttctgatatcaccagaacatccctgacagagcaactctagagaagttttgtcagggacagtaatttttcctccattcttgttagcttctatagtcactattcgattaagaaatttcatcataattgttggtgccacagggttgaaactaatatttgagatagaacactcttcctgaatttctttgggaaacaataacctttgattattatctccactgagactgtccgagattataaatataagaggacatcgaccaatcctcacatacttccttagaacttcatgtaaagtatgagaatcccgataaaactggttaggtaaatcttcaaccagaattatcttcttatcagttctcagatcatctccaagcatttgtaacttgttatactttgtcgctcttagtagaaactctttgaaaactgctatctgagactgatagggaaacatatggaagcttgattcagtattaaacatccccttgaaatcatctttttggaagtctggtaaaactggattaatccactcttgtacttgaataccatgctcctttgatagtatttttaaggtcgttgtctttccacatccaggaggacctgttattaataaaatagatccaccctgttttggttgcctttctaaaacttgagcttttaaccaggtttcgacttcttcaattnntctttttatgcacagcaagttcatgctgattcatttcgtcctcatcaaaagattgtgactggtactataatcttggcccctttcctctatatttttgagagtatgaaaatatctttcattatagtaanactttcgnacagcaattctgatttgcaaattatttatacattttatagtttcatttcttacataaatgtggactcccatatacttttgtcattaaaatcaggcaattctatttgagcaatttttatactgaaaattaaagttttccttatttcaaattacagttgcaggtcttcatttccagtatttcccaaaaaagtaaaataccatgaattcacttgctcctttaaaaagcagataactgtccctgaagatgcgaggttactgaaatgagatgtcagaggtagaccttcaagactattcctagccgacccaccaccaccccacacagtgaacagggaatactaagctcaaatattcgtccaacgtaatcctgtaatcagtggggtgccgggttgagctcgcaaatccccgctgcaggacagggctctgcaccctcaatcttctcatccccagatgggatgggcgggtcgggaggaggagcgacgagagcccaggaaagcttgaaggcagagatagactcgcgtctctaagacatatacataatatagccgcaaccgcggcggccttactttcccggagctgcatccccttttgggcgaagagcggaggcgaccagggactaccctaggtgaaagggcagccacctggccctacccgggctcaacgccgagcctctcggaggtacggcctcccggggaccttccagactggtcggcgcaagcgaagggcggggaccaccgaaggagtgtgtgacttaggcatccagcgcactgcctgacccgaagtaccgacccgagttatgcccaccctccaacttttgcggcggggaccatgttgcttccgaacatcctgctcaccggtacaccaggggttggaaaaaccacactaggcaaagaacttgcgtcaaaatcaggactgaaatacattaatgtgggtgatttagctcgagaagagcaattgtatgatggctatgatgaagagtatgactgtcccattttagatgaagacagagtagttgatgagttagataaccaaatgagagaaggtggagttattgttgattaccatggttgtgatttcttccctgaacgctggtttcatatagtttttgtgctgagaacagataccaatgtattgtacgaaagacttgaaacaaggggttataatgagaagaaactaacagacaatattcagtgtgagatttttcaagttctttatgaagaagccacagcatcctacaaggaagaaatcgtgcatcagctgcccagtaataaaccagaagagctagaaaataatgtagatcagatcttgaaatggattgagcagtggatcaaagatcataactcttgacttataaggctagctacttaataatcactcttgttgatatctctgccgacatcatagaaattgttcaagtgtcagtaacactttattaaaatcatgttgcagaaccagcaggtggatagtatataggtttatgcctgtgtttctttttctccatgagaaagctaaacatgaaatataatgaatatagtattattaaggattgagacaaaaactgtgattttaatacttaaattgctaaagaataaataaatctgacaaaatgggtggatatcttttaagtttattacagaaaaaaatgcagatgatctcttaaaataaaactaaagataaagcaaaa

SEQ ID NO: 136 - DNA, 1023 bp, Homo sapiens
  misc_feature: Incyte ID No: 244251.4
  unsure 481-542: a, t, c, g, or other
atcaacttataatattgaattaatgttaatagtgtcattttaggtgaactagacttcattgaaggaggtgggagccttatggagagagagtatatgattatctctatttgtatttaattaccatttcatctaaccattcagaacatatttcaagaataattttaattcaagttgtagataaaacttactataccattttcattttgacgctttccaagaatgagatacacggtattttaaagacaaagattgatcttacatgttactattaaaaaaaacacgataattttgttctacatttatacttttaatttttctgtggataataagaaatgccaagagtcgattgtgtccatgctggcaagtggcctaataaattgtccttttatttggtggtcctcagagtggcagttaacatcttgctattctgccttgtggacttgaggtggaaaggttcatggaattatatccttgcttttgnnnnnnnnnnnnnnnnnnnnnnnnnnnnnnnnnnnnnnnnnnnnnnnnnnnnnnnnnnnnnnaagctgccatgtaaacgtatttcatcacactcccgagaccttcttctccagtagtgttttcaagctttttgagcatgcagacactaccatcaaaaaattatgtagagacatacttgagagttacagtttaaagaaaaacaaggtgtaattatttggttattagtagcatttacatatgcttgaaaacttctgctatatatacagtaagattaatttattctaacaatgatcttgataattcccctgattcccagactccttggaatagctccacagctatcggtggttctgccacaggttcagagccttcccagtactgccttcttatttgagaggtgtgctaagagctataaagcggaggcttcaattgtacacagtttggaagtttaggcaaaagtcatttcttccctatattttgtcatgcttatctcctgtctctttctgttttacagattagcaataaactccttaaaacccaaaa

SEQ ID NO: 137 - DNA, 373 bp, Homo sapiens
  misc_feature: Incyte ID No: 021555.1
  unsure 273, 279, 339: a, t, c, g, or other
cctgacttacccaatcttgtgatgtttttccataaaactatggttgttggtatatttgtgccgtgatgtatttgtcaacacatcactctgaagaaaagtatgtggtgactttctgtgactgagcatgatacatcttctttctctgatcccgtttccccagatgagcatgtttcaacattttagttccttttgaggacttctgtcctaatgctgcgtctttgtacaatgcatttgcttagctgaaacagttgctattgtatgcccatttgctgnactaantcctacttctattccctataaagacatcagcctttggttctgaacatacccgtaaattangagtcttccagtcttggaatgtaaaaccctttgg

SEQ ID NO: 138 - DNA, 2662 bp, Homo sapiens
  misc_feature: Incyte ID No: 234157.3
gccagctgccgaggcgttcggtcctgctgttgcggccgctgccccagggctgcggggacgctcccggagccctgcctgttccctgtccatccaggccagcagctgaaggagcctcacctgcctcccttctctgagtagcacggatttgaggagaagcagcgaagatgtccagcgagcctccccctccttatcctgggggccccacagccccacttctggaagagaaaagtggagccccgcccaccccaggccgttcctccccagctgtgatgcagccctctccaggcatgccactgccccctgcggacattggccccccaccctatgagccgccgggtcacccaatgccccagcctggcttcatcccaccacacatgagtgcagatggcacctacatgcctccgggtttctaccctcctccaggcccccacccacccatgggctactaccccccagggccctacacgccagggccctaccctggccctgggggccacacagccacagtcctggtcccttcaggagctgccaccacggtgacagtgctgcagggagagatctttgagggagcgcctgtgcagacggtgtgtccccactgccagcaggccatcaccaccaagatctcctacgagattggcttgatgaatttcgtgctgggtttcttctgttgcttcatgggatgtgatctgggctgctgcctgatcccctgcctcatcaatgacttcaaggatgtgacgcacacatgccccagctgcaaagcctacatctacacgtacaagcgcctgtgctaacggagctgggactcgggactcccccgcctgtcagtctggccccctgtgctttgctccctgcgctcagtggtcactttcccgctcccacttggggctgggagccgtgccaccatcccctagaagtcctgtcctcttcaccctgccctacctgagccgctgactcttctggcaaaaattctgttgggatttaaggccaagggtcagtgggtggcagggggctggcaatgagcttgtgtgttgttggtctgcttggtgtgtgtgatcgggaagataagctgggaggggtctcctgctggggtcctgatgcctctgtttccaaacaaggtacaggttcagtccagactctttccccctgggaccaacagcagccagagcagttagccagttagtccccaggcctgtggccacaggcgtttctgacctgctgggccgagaatgggtaagttgtctggagtcaggtgggcccacgtaggacagggtcacaaagcctgggtttgtttctgggtactttgcgcctctggggtgctagaggtggggcatggtggctggaagtaaaactgccaactctggccctcagaactctcaggtatagaagcccaggatgtctaataccctgtcccagtgcccgagagctgcctggtgtcaggtagagaggacactgtacctgggtgaatgatcagaccctggtagctaagaaggaacttgtccctttgagtcagtgtgcagaccccctttcaggccatgcctctgtgaaccctgtattgctggggccggaaggagcccctgagcctagccccttcccgtctgccctgtgtcctcactgcgtgtgggtatgacctctgcctggtggctggtgtatcccaactgggcaagagatggcagagggtcccccttgtgggtgcgcttggatgtgcagagccttctccatggattttcttccctgtaagtgccgggcccctcaccccagctgacaggctgttgctgtgcctgctcacacctgctcctgcaggcacactgggctagggacgaggaaggagcagccacaagtggtagaactgccttggtggacaccagcctcgccctgtctttatttcctgaatggtttgtgaacttgctcacctggaccactgtatcctgccactgtccttcctggtctcgcactgccactgcatggcctcctgtcactgtgaatcgtggcccagtctcagtttgtagtttctcattaaattggccctttcactcccccgccctgggcctctgctctcttgcctggcttccttcttttttgagggaaagagggtggggctgcaggcagtctactggcaggacgggaggctgagtcctcagggtctcacaccctcagtgctgatgccatgccaactgcctgggacaacaccaacacgtaaggacctaattaaaccaaaccagagtcgggtgtagaccagccctgggatttccagctgtgactgggccagggcacacgttggtctcggcagtggctgtaaggtcaccttccttcctctgatgctggtttcaaccatctatatatggcatccacgcatgggatctgcaagctggagccctcctacccgcaggcttgagcacagcatcatccagccctggggaggcgcacccttaagcaagacagactgggctgaggctgacaggcagaagactaacagagcgcagtctgcacacgcaggttctgggcgacctctggccctggccatctctgcactaactcatctgaattatgaaggtggcagtcttggtcagtagtttaaagagtttccctactttttaaccctttttgaaataaaacttttacaggtagtagattcctattaataaaattatttaagttcaaaaaa

SEQ ID NO: 139 - DNA, 614 bp, Homo sapiens
  misc_feature: Incyte ID No: 903478.1
ttttgcaagccaagatggctctgacatcatacaaactgggccctgagctgtgagagaccagcacagcagcgtccaggttaaaagccgctgaccaaagtccaatgcacaatagcccctccgaaaggaaggaaccgcttcacttcttgccccacttggggcagcctcttgttccagcctcttggaatgcccagcttgggtttctgagcttttctccctcatcctcccccatccccaaactccttctcctaccatgcctttctacgttctctttcttccaagcctagagccaccagcccagcttccttctctggaaaagcctggaaactgggcacagaaggactgtgtgcctgggtctaacatgtggtcccctttgtccctagcacctttaaggggaggggaagaattggagggcagcttgcctggacccctaacggctgttctcaggaacaggttcccaggcctggggtgtttgtggagatctgtctttctccaaagatttcatccaactcccctttcatcccactccctttcatcccatttttttctttctgtccttgagcccagtgagttcaataaaaaccaaaatatttggctctcaaaaaaaaaaaaaaggg

SEQ ID NO: 140 - DNA, 2341 bp, Homo sapiens
  misc_feature: Incyte ID No: 411296.2
catccttggtggacgcgttagaagcctcctatggatggtgctaatatttttttttctcttcgtggagggtttgggatccttcttgcaggagacggaggttatgaccctcggggagccggttaggatcctggggtggcgtctgaatcttcggggaggtgttaggacacttggggcggagttagcctcgctcagggcgcggctaaggcgcccagatggcctgcgggcgccaccacgtccctggtcccagctcgggagcacatcagaggcttagaggcgagtgggaagggactcagacagtgcaggacgagaaacgcccgcggcaccaaagcccctcagagcgtcgcccccgcctctagttctagaaagtcagtttcccggcactggcaccccggaacctcaggggctgccgagctgggggggcgctcaagctgcgaggatccgggctgcccgcgagacgaggagcgggcgcccaggatggggtgcatgaagtccaagttcctccaggtcggaggcaatacattctcaaaaactgaaaccagcgccagcccacactgtcctgtgtacgtgccggatcccacatccaccatcaagccggggcctaatagccacaacagcaacacaccaggaatcagggaggcaggctctgaggacatcatcgtggttgccctgtatgattacgaggccattcaccacgaagacctcagcttccagaagggggaccagatggtggtcctagaggaatccggggagtggtggaaggctcgatccctggccacccggaaggagggctacatcccaagcaactatgtcgcccgcgttgactctctggagacagaggagtggtttttcaagggcatcagccggaaggacgcagagcgccaactgctggctcccggcaacatgctgggctccttcatgatccgggatagcgagaccactaaaggaagctactctttgtccgtgcgagactacgaccctcggcagggagataccgtgaaacattacaagatccggaccctggacaacgggggcttctacatatccccccgaagcaccttcagcactctgcaggagctggtggaccactacaagaaggggaacgacgggctctgccagaaactgtcggtgccctgcatgtcttccaagccccagaagccttgggagaaagatgcctgggagatccctcgggaatccctcaagctggagaagaaacttggagctgggcagtttggggaagtctggatggccacctacaacaagcacaccaaggtggcagtgaagacgatgaagccagggagcatgtcggtggaggccttcctggcagaggccaacgtgatgaaaactctgcagcatgacaagctggtcaaacttcatgcggtggtcaccaaggagcccatctacatcatcacggagttcatggccaaaggaagcttgctggactttctgaaaagtgatgagggcagcaagcagccattgccaaaactcattgacttctcagcccagattgcagaaggcatggccttcatcgagcagaggaactacatccaccgagacctccgagctgccaacatcttggtctctgcatccctggtgtgtaagattgctgactttggcctggcccgggtcattgaggacaacgagtacacggctcgggaaggggccaagttccccatcaagtggacagctcctgaagccatcaactttggctccttcaccatcaagtcagacgtctggtcctttggtatcctgctgatggagatcgtcacctacggccggatcccttacccagggatgtcaaaccctgaagtgatccgagctctggagcgtggataccggatgcctcgcccagagaactgcccagaggagctctacaacatcatgatgcgctgctggaaaaaccgtccggaggagcggccgaccttcgaatacatccagagtgtgctggatgacttctacacggccacagagagccagtaccaacagcagccatgatagggaggaccagggcagggccagggggtgcccaggtggtggctgcaaggtggctccagcaccatccgccagggcccacacccccttcctactcccagacacccaccctcgcttcagccacagtttcctcatctgtccagtgggtaggttggactggaaaatctctttttgactcttgcaatccacaatctgacattctcaggaagcccccaagttgatatttctatttcctggaatggttggattttagttacagctgtgatttggaagggaaactttcaaaatagtgaaatgaatatttaaataaaagatataaatgccaaagtctttaccacaaaaaaaaaggcgg

SEQ ID NO: 141 - DNA, 614 bp, Homo sapiens
  misc_feature: Incyte ID No: 018044.1
ggatggttaagtggcccccacggtaggccttgcagaggagagtagcttaaactgctgcaaaagaggcgtttctcgtggtgtcttgtgggagtggcggtgcgatccctctcagacttgtgagtccctgctggagtcagaagttttaggcgaatcccaggcgcgccaaggaaagtgctacaaaagccatccatcttgcaagcgttggtgccgaggcgcaacgctgagaacgcaaatactaaagggcgctgttctttcctcgtggagctcacagtccgctggggagaccgtgagatgacagcagagaaactagcgcgatcagtagtactcagcgcaaggacagcgagcagagaaggcaaacctagtgcttgctaaggaagacttcacagaggaggtagtgtcagggccgagactaggagaaggattgtaagtgactagattttactttatccttctcgttaaccaaaattaatttacctctcaccttttctcctgttgtcgtcccacccctatcgaggcagtcacaccttaaaaaaaaaaggaggggttattcctgctattgccgtgctgtgatccagggcagagtttctcgtcaaccagtaaaacatccagtaaca

SEQ ID NO: 142 - DNA, 1519 bp, Homo sapiens
  misc_feature: Incyte ID No: 407260.2
ttgtgttccctcaaatggcggtgtgaagagagttcgcctgagccagatcccaggtttcactgaagaaacttcttagagattcattgcacttctgagatttaatgtttacaacttggagttgtcgaccttcttataagatacattttggaagtcaaaatgaaagttttctgtgaagttttagaagagttatacaagaaggtacttcttggagccacacttgaaaatgacagccatgattacatcttttatctcaacccagcagtttcagatcaagattgttctacagccacctccttagaatgggcaaacacctgtggtatccagggcaggcatcagcccatctctgttggtgtggctcccattgctgtagcacctgtgtgtttgaagaccaactctcagatgagcggttccagagaagtaatgctccttcagttaacagtgatcaaagtgatgacaacccggatattgtctgtcaaaaccgagttccatgcaaaggagcagtacagagatgtaattaaaattctcttagaatcagccaaagtcgattctaaattaatctgcatgttccaaaattcagataaattgttatctcacatggctgcacagtgccttgcattgcttctatatttccaattgagagaaaagataaccttaagtaattcctggattgctttttgccagaaaaatctttctgaatactctgagagtaataaagcaatatactgcctctggactcttacagcaataataaaagaaatctttaaagattcatgttcacagaaaacagaaattctaaagcagttcctgactcatttcgacaccatttttgaagtgttttacaattccttattctctcagcattttgaaaactgccgggatacttctaaaatagtaaacatcctgatgtgtttcctggatttgcttgagcttctcatcgcctccagaatccacctgaagttacatttcacttgccagaggattttatttttgaaaccatcttgcatgctagaagttattacctggcctattcaggcttttgttaaaaggaaggtcatcatattcctcaaaaagtgccttctctgtaaagtgggtgaagacctctgtcgtggatctgtgcctgccttaatgccgccagaccatcatgtagcggtggacatgctggctttagctaatgctgttttgcaagctgtgaattcggggttgttgaagacactgtctgtttatgaaaaacattccttttttggaggtgatgaagttcaacctgaatgtgaacttatcactagtccagatcatgtgatccttagagcagcaagcttagttataatgaaatccttagaaatcaagtttcaaaattattcttcagcaagtgaaatgaaaggtaattctccaaactccttttgtatgcagtgtgtaattatttacttaagtacagtaattcataattatcaaatctcaggactagtttaaattccagtaatttaagctatatgttatcctatttgtaacttattacattttc

SEQ ID NO: 143 - DNA, 194 bp, Homo sapiens
  misc_feature: Incyte ID No: 978765.2
ggggcccttggcgctgcccgcctggctgcagcccaggtatgtattttacctacagtcatctatactcagaaagaagagacatcctcggaatctttcccattaaaaaaaagaagatgtgaagtacagcattccagtgtgacacgagaaaagacaggctgtggattcagtgcagtaaataaaacacaggaagtatt

SEQ ID NO: 144 - DNA, 536 bp, Homo sapiens
  misc_feature: Incyte ID No: 338274.1
  unsure 454: a, t, c, g, or other
gctcgagaccagccaaaatggagagacataacactttgggcattcaggtgggatgagaaaaagactacaatgtaggagttgggctactttagccctagaatatgagctaatcttgactcaccctaatgaagcctaaatctgagcttcaacaggattaatttaaggtcccatgaattaaataccaccataaaggaacatattaataattcaaattatcaatattgcacttacaatgcccagcatgtaataaaaattataagacagaaaaagaagcaggaaaatgtgactcataaccagaacaaaaaagatcaatagaaatgaactcagagatgacacaaatgttggaattagtagatagagaatttaaagcagctattataaataaatatgttggaggatttaaagtaagatgaatagatgtaagtaaagtaagatgaccttagcagataaattncaacaattaaaggaaccaaatggaattctagaactgaaaaataaaatataccaaaaagaaaaattaactggatgggccttaa

SEQ ID NO: 145 - DNA, 1574 bp, Homo sapiens
  misc_feature: Incyte ID No: 231270.1
  unsure 679-863: a, t, c, g, or other
aaatgaggcccccttgcttaaggcatggggtccgtggcaggcaacggggtgggactgctgccccagatgtggccatgggggtcgtggtcctttcaacaccaagctatgagctgtcgccatggagaccaggccacctgtggaaaggcggattttgtctgcttttgacttttcttttttaatatgtaaaactccacatcagcggaaaaccccccctacttctggcctggagcttcagggttttggtgctgggacgagtttgttgttctccttagcggggtggcgcggggggctcaaaacgggggcgcgggggctggagttggcagagctctgcatgtcccggcatgtctgagcaggaggaattccgggcggccaaagggttttatgtagattgcttttggacactcgcccaggagtcaggagttgatttttatctcacttcctggtaaccttgaacttaccaggcagggatgagatgacgtaaacttcctcagatgatgtaagttcagccacatcttgctgcccattagggagagaggacgacccccacagtgaaagtaattgagtgaaatgcacgttctggaaatcagtttctattttggcctggaggaatgtggctatactgcttccctgagtgtgacacagttggaatctaatcttgttggtttcccaacatctaggnnnnnnnnnnnnnnnnnnnnnnnnnnnnnnnnnnnnnnnnnnnnnnnnnnnnnnnnnnnnnnnnnnnnnnnnnnnnnnnnnnnnnnnnnnnnnnnnnnnnnnnnnnnnnnnnnnnnnnnnnnnnnnnnnnnnnnnnnnnnnnnnnnnnnnnnnnnnnnnnnnnnnnnnnnnnnnnnnnnnnnnnntcctcatgcaagaagggaaggaccaagtcccattccctcttgcctcattttcagagcctggggtaggggctacaggtggcataggaagggtctgcaaggtgggtgggacttggcaggtgttgggaagaggaataggggtggcaagtgtcaatggtgaaaagacaggctgaggggtgtggtgggaaggctgggggagaaaggtgagaagtgattgggggggcttccctgatgagtcctcatggagggtgctgaggcagggaacaggggtgcagggacagtgatcagggcacctggtaccctgaccaacttgatgatggcatctcttttaagatgcccaagtctgcgcacttttattcctttattcggcccctagcaccccctccccaccccaaagaaggtcagtagcatgcgtgtggggatgtagctcaaaaaagaaataagatggagtggaaaggaaagaaaggaagaagcaggaattcaaggtgggtgggctgagcttggggccacctagcccacctgctccaatcaagggctggaacaaacctgaggccacttggagaggcagggctgggcagggacagggggtgggggccgaaatcacagcttccccatcagagccagatgtgtgaaggaaatgtcccagatggcagtagtttctcggcaaggaggggaatcctggagatggttcatgtctgtgatcccagtgctttg

SEQ ID NO: 146 - DNA, 192 bp, Homo sapiens
  misc_feature: Incyte ID No: 018092.1
aaaaaaagagaaatgtcaattatgcagggagttgctgcttcctgatggtgtcgatgttcagattaagcacacactgccctgatcaacttcagtgcgcaccagatttcaggtcctggccatatctctatgttttttccaatatagaccaatataaatgtagagtctttaagatgaaaatgagtgtgtatgcac

SEQ ID NO: 147 - DNA, 413 bp, Homo sapiens
  misc_feature: Incyte ID No: 404197.8c
gccggtccagattctcgtgtacctccaggaccttcatggcatgcacgacagcctcgggccttctgtcctgcagggctgtagccagcagaggggggcgagggcagctcaggtgcggggcaggccgggccgttctgcagggagtcctggtaggagggcggcagggacgcaagctgggactccgagtggtagggcgagaagcctttccgcagcgtgcggaactctccggagcctgcctgctgcaggggagagaaggagaggggttagacggagggccaggctgaggaggacaagggccctgggcatggctcctcacggcagcaggggctgctcaaaggcacggccccggaggacccctccaccctcccctccacaccgcttatccgtcccccgagccgggatcaatcgatcttcac

SEQ ID NO: 148 - DNA, 6268 bp, Homo sapiens
  misc_feature: Incyte ID No: 404197.4
agggggatttcaggccccagacacgggcaggacctccagcccagcccctgtcttcttcctctgtggtgaactgtacataggacgctgcccgccctggcccagctgccatgggtccgatgcactggcccaagccgccatctcccgcctcatacaccagcaacctgggaagacgagacgctgcgactgttcctgcagcagagcggcccggacgcctcattccccctctgggccctgggctccatgagcaagaggctgcaggctgcttctgagatccagcctgggaactgtccaggctcctctgtcctgcctgggatggaggggccactcatcaaaccctctactccccggctgccacccacactggacagagaccaccactacctgggtcttgacgcaggtggcaccacttcttgcccaaatgccgtggcctgggcccaggccccccaagcactgggtccccggcatgtggacaaggccactcaccacatctgtggctggctggaggctgccctgggcccttcctgtgaccctcagccttggaggtcagggtgccctcacacctggggatctgtgctcagccacccgatgcccgctgctccttgcttttggaggtcatccccctcccccccagtctctgcaatgtccccctgccaccctgtccaggctatgcccttcttgggctcctcctgccccatgcctgaggcacgtcccttttcgtggtttacatgacaggccagtaacaggaagggcctggggagagtttctgggctgagccacatgtgattttcctgatgggcagcactgggccacagctggggctctggttggctgtgacctcccccagggcctggctgcatcttgggtccctgtggacagagctgtgtaggctgcagatgagagttctgttctttttgggaaggagcgtgtctggccaggttctgcctttagtttgtggtgtgacctttagcagttcactcagcctgtctgggctcttggtggaaacaggtctctgaggttccttttcggccatgcttatggctccaggtcatccagcgccacagggcaggggtcctcactgagggggcgtgagccaacagccgacggctgagggcgggccgggtggagctgagttctgctgccttgcagtcgctgcgggtggagagttgcctccccactctgagcccgtgtcctcagtagtaaaatgggcagcataaggccctcctcacaggattctggcatcaagtgagatcttcagtgtaaatgaccatgtataaactgtaaagtgcaatagaaaactgtgtgtgtgaggaaagtaaggcctagagggggtgatgtgtggcacatgacaggggagatcccacagctgcagcacggggacaggccgcttccccacatccgctcatgccactgtaagcagccctagctcttgggtccaggacctcaccagctcctcgtcagactcctgtgctcttccaggggctgctcagccccacctgaagagcccagagaggctgtcttcctacccagcaggtctcatgcaggcccagggctggggatgcaggcaagaggagggagatggccgccctgtccctctccctagctggcggctctattctgagcagttcttgctgcccgtttgctctcaggggaaaggctcacgccccccatcttagccccaggggggtaagtgggtgctggtgatgggatggtgtggcgctcctgccgtgggtgttgccaggaggctctttgggaaggagtgtcgcccggtcaggtggtgcgctcccggtcactaggggtgtacacgtgaagttgggtgaacacctgctgctcatggtacccagtgattcttgcccgagtgggcagctgagcagaggcccctctgggtcttgcagtccaaagaaccgcagagtagcccaagggctgtgggtccattttgagtggcagccaagtctgggagcccgtgtgcatcatgtttgggtcaggttggcgtggccaccactgaaataagcaataagtacgggctcctggtacctgcggatctcctgcaaacaggcccagagaacagccttgaagccacctttcccctcaaggggactgaccctgtctttaatgctgcagtggcatccagggatcagtggaacattgctttgagaaccctcctgctgttacggaggcagcacaaagctggtgacccctgagccaacacggcactgggatggctttctaggacagaaccctgtcggcgactgtcacatctcaaactaatagctgattttaaaagccagcagcagcgacgccatgtacctgagtacaggtggcagttgcagagccgtgggctgtagaaggtcagatggggcttcccacaggggaaatctgggcgtgctgtagctcagggtgactcccagctccgtcactagcagggcgacccccttccttctggagccttagctctgaaagcccccagtgggggtgccctttcagatgccccctttccatttcaaaggctctgactcttgatcttgaagccggacgcggcactggcactcggcttcagtttccactgtgacagatggaggtctcctttcgccccagcccaggtggccaagcccatcctggcctcagaacatgctgagcacattttgtagggtggcacctttttatccaagttactagctacacatcagtgtttaaagagaaaaaagtgacctttcattttttttttcttgaaacttgaggaaacaagatacatactactgattttttttttttcttaaaactaaatgcatgactgcagagcggtagaggtgtatatttttcatactgtggggcaaagtatttgtgctgctttttggagatggactggaacgtctggtttctgtccccgggcccggcagctacgtctattttctgtagaaggtgccacagtgagacctggagccaccccttcctgccctggcgccgtttagagctgggagcccgtggactcccggcctgtttctaccttctattcaaccactctgacgtggggagacaagaagaaatagaactttttgatagtgtggtaaaaacattgatttgaactattttagtaaaaggagtaacaaacaagattgtgatagtgtctactttgagctagataaataaaggcctctttgtgagcctcctggctgggtgctcagtgcttgtttctgtcgtgggtggcagggtcagcaggcagagacagggccaaggcccctcaagcaccgcagatgggggctcagtcggggccccttccacagacagagccgtggcccctcaaggtggacagtgaggccgctgctcctccagctgcctctgtctcatcacaggccagaagtggaaagggtttcaaatccaagcccccgggttcctgtgtgcgttctacgcagcaaggcttcaaagtttcaaactggtttggaactcaaccaggtcctccaaaggaaaccaaggcaggcacaggatgggggcaggctggcttggcaggcagctgtgcggatccacccagagtgccttgggaggcagtggggttggctgtggctgctgtgagctgcagccaggcctctcccgcgtccccagggtctggaaggagggcctctgcacattttataagccacagactgcgaaggcctggagccccaccttccacccataacaaagaaagggatagtttcagaactgcttttatttggataactgactgaaggagtctcatttgtaaccaagatggaattcacagtatgttgttacattcacacttaaaaaatatatctctatgtacaggaatttgcaaagagatgtaaacatacattaatttccaagtacatttctccccttctccctggaggaaaaaaaaaaagccatccaatgaggcaaccccttcaaaataattttaatacaaaggatgcaaacatctataaatgaaaaatgtggttcttctgccccttctgggtgtcatgggagagaatgtcaccgaatgaaaatgacaacagcttggcttcagatggaattggactatttaaaattgagtttccaggaaaaataggcactgatttctagaaggaaattaactccttaccgaagctatttattgagccaatatggctggttaacgtcctcactagtataaagtaacccagtgcaggactctcagacattagctgaaccaagtgtacacagtcagactgcaagggcactgatgaggctactctgaaagctggttgtccccgtcctctaggtgtgaggaccactctgattttatcccaggggcccggtccattcttcccatactgcaactgtcgtgcattatacaaggtaccctgctgcttacccacttcaactactctgcaagtcgattagaaaatcttgttaaaaaaacaaagagggaaaaaaggctcacgttatctcatccaggctgcccgccccagcccctccaactggaggcatgccgggtgggggaatgggcgggggcacaggaggctgtcctccaggggggacggcaggaggtgggtagctggctggcggcaggcccaaccctggaggaggatgaggggggactgcgtgggtaggcgggaggcgtgggggtgggggtgggaagttggggttgtaggtgggtgggggttgggggtagccaggagtagggggtgggatggcaggtgggggaaggaggctgggggaggaggcacaggtggcgggggcgggttgggcgggtagacatgggggtggtagggcaggtgtgcaggtgggccgtaggcggggggcagggcaccgtaggagggtccctcggtcttcatcatggactgcaggctctggtagccctctccagacatgtaggagctggtggtggacatcccggtcatgtagctggaggggggtgggggcgggggccggtgtggcagcggcggtggctggtgcacaggggccgggtgggccggagggggaatctggactttggggaggtcagtggcatccacagggcccggcggctcagcctcacctaaggcagcagcgaggggaggcttccggtctggaggtgggtgggctggaggcaacggtggatgagtggtctcaattttggggattttaggtggtggtggttctgctgctttgttctcttctttgggagaaacaaccacggctcgcttaacctgtcggggagaactgggctgcggagagggtttcttgggctgttgggctggctgctgctgctgggctggttgctgggggtccttctgctggggctgggatggttcggagctttgagacggctgtgactgctgtacttgcggcacttgtggtgtaggctgaagagatgggggctgttgcagctgatggggggtgtgatgaggcatctgttgttttccttgtgagtaaagatccaggatttggtggcagatgtcttccaaaacgtcgaccgggacatcttgaacaaactgctcccaccatctcctatacatgggtttggaggtccattcttgtatttcaaatttgcacaaacgtcctgcgagatacatcactgctactgctatgatctctggttcccactgcagtgacaaggtggtgcagagactgtcatttacaaatgtccatgccatttgaaccaacttttgaattttgtttttatcacctttgagttgctttgcatattttagtaggaactggtatggatgttctacctgtaaatcaaacttgatggtctgcagtaagattctctccagaaccattacttcctcctttgggtcatctccaaactggccaaattgtacatcatttaataaactacgagctgttttgatgatatctttacatttttttggtgtttcttctactttcccagccagaaagaggcaacaggctcctgtcacatatcttgggaattgcttgaaggaatgaaacatatagaagcgatgaaaataaattattccagttgccagggtatcatagtgtagccccaaacgtgtgcccacatcaaagatgaaccgagcgccctctcggcggtaccgggcctcggtggctggatcaagtccttcaagttgtgagggtgtatgagccaagtctttcttatcccagtaccaacatggctttgtgtggtccaggtttgctgaagttactgaagggcttgaattttctttattctccttcatttattgaagtaggcttgttctttccaaaaggttctctgaaaatgttagaatcccctcgcttcaggcaagcccctcagcgacgtctctccttgccgactgcggccatcttg

SEQ ID NO: 149 - DNA, 561 bp, Homo sapiens
  misc_feature: Incyte ID No: 005460.1
gcggaaccgcagccatggaggagatctcccatgggtctgcgcttagtgcccgccgcgagtcacacgcgccagggacctagaggagcctttggcatttgggggctgtggggaacatgaagtgagcgcgactcacggcctggagtgcaggaaaggcttctcctgcaaggcggtggcttcaaaaaccagaagtctggtagcaccacgtgcggcgtctctaaactcttggtcgtctctgacttttaaacatctagggaaagttctaaaacgtgtgtcctggcgtagtagttttggttggcacttggtgaggagggaagaatttgtaaagcactgtaacttctatagttaatccttccagtggagcttggatcccggcggtagcactccccacaaacctcctcccatgcattttgaagcttagtacgtggctgagcctagaacttgaagcttccaaactcagtgctcgctttaacgcagctccctgaaacgttttggaatcggatggtctcaggttgaactttgcagttttcctcaactgtaaaatggggatgacagtgcatgagg

SEQ ID NO: 150 - DNA, 4601 bp, Homo sapiens
  misc_feature: Incyte ID No: 346511.4
  unsure 2913-3008: a, t, c, g, or other
gtttcctggctctgggcagcagcaagaattcctctgcctcccatcctaccattcactgtcttgccggcagccagctgagagcaatgggaaatggggagtcccagctgtcctcggtgcctgctcagaagctgggttggtttatccaggaatacctgaagccctacgaagaatgtcagacactgatcgacgagatggtgaacaccatctgtgacgtcctgcaggaacccgaacagttccccctggtgcagggagtggccataggtggctcctatggacggaaaacagtcttaagaggcaactccgatggtacccttgtcctcttcttcagtgacttaaaacaattccaggatcagaagagaagccaacgtgacatcctcgataaaactggggataagctgaagttctgtctgttcacgaagtggttgaaaaacaatttcgagatccagaagtcccttgatgggttcaccatccaggtgttcacaaaaaatcagagaatctctttcgaggtgctggccgccttcaacgctctgagcttaaatgataatcccagcccctggatctatcgagagctcaaaagatccttggataagacaaatgccagtcctggtgagtttgcagtctgcttcactgaactccagcagaagttttttgacaaccgtcctggaaaactaaaggatttgatcctcttgataaagcactggcatcaacagtgccagaaaaaaatcaaggatttaccctcgctgtctccgtatgccctggagctgcttacggtgtatgcctgggaacaggggtgcagaaaagacaactttgacattgctgaaggcgtcagaaccgtactggagctgatcaaatgccaggagaagctgtgtatctattggatggtcaactacaactttgaagatgagaccatcaggaacatcctgctgcaccagctccaatcagcgaggccagtaatcttggatccagttgacccaaccaataatgtgagtggagataaaatatgctggcaatggctgaaaaaagaagctcaaacctggttgacttctcccaacctgggataatgagttacctgcaccatcttggaatgttctgcctgcaccactcttcacgaccccaggccaccttctggataagttcatcaaggagtttctccagcccaacaaatgcttcctagagcagattgacagtgctgttaacatcatccgtacattccttaaagaaaactgcttccgacaatcaacagccaagatccagattgtccggggaggatcaaccgccaaaggcacagctctgaagactggctctgatgccgatctcgtcgtgttccataactcacttaaaagctacacctcccaaaaaaacgagcggcacaaaatcgtcaaggaaatccatgaacagctgaaagccttttggagggagaaggaggaggagcttgaagtcagctttgagcctcccaagtggaaggctcccagggtgctgagcttctctctgaaatccaaagtcctcaacgaaagtgtcagctttgatgtgcttcctgcctttaatgcactgggtcagctgagttctggctccacacccagccccgaggtttatgcagggctcattgatctgtataaatcctcggacctcccgggaggagagttttctacctgtttcacagtcctgcagcgaaacttcattcgctcccggcccaccaaactaaaggatttaattcgcctggtgaagcactggtacaaagagtgtgaaaggaaactgaagccaaaggggtctttgcccccaaagtatgccttggagctgctcaccatctatgcctgggagcaggggagtggagtgccggattttgacactgcagaaggtttccggacagtcctggagctggtcacacaatatcagcagctctgcatcttctggaaggtcaattacaactttgaagatgagaccgtgaggaagtttctactgagccagttgcagaaaaccaggcctgtgatcttggacccagccgaacccacaggtgacgtgggtggaggggaccgttggtgttggcatcttctggcaaaagaagcaaaggaatggttatcctctccctgcttcaaggatgggactggaaacccaataccaccttggaaagtgccggtaaaagtcatctaaaggaggcgttgtctggaaatagccctgtaacaggcttgaatcaaagaacttctcctactgtagcaacctgaaattaactcagacacaaataaaggaaacccagctcacaggagcttaaacagctggtcagccccctaagcccccactacaagtgatcctcaggcaggtaaccccagattcatgcactgtagggtgctgcgcagcatccctagtctctacccagtagatgccactagccctcctctcccagtgacaaccaaaagtcttcagacattgtcaaacgttcccctgggttcacagatctttctgcctttggcttttggctccaccctctttagctgttaatttgagtacttatggccctgaaagcggccacggtgcctccagatggcaggtttgcaatccaagcaggaagaaggaaaagatacccaaaggtcaagaacacagtgattttattagaagtttcatccgcaaattttcttccatttcattgctcagaaatgtcatgtggttacctgtaacttgaaggtggctacaaagatgactgtggacgtgggttgcactggccacccaaggatgtctgccacacctctccaaagccctccctacctaccaagatatacctgatatattccaccaggatatcctccctccagatatacttggttctctccaccaggttctttctttaaagcaggattctcaactttgatacttactcacattgggctagacagttctttgtttggaggctctcttgtgcannnnnnnnnnnnnnnnnnnnnnnnnnnnnnnnnnnnnnnnnnnnnnnnnnnnnnnnnnnnnnnnnnnnnnnnnnnnnnnnnnnnnnnnnnnnnnnnccctaggtgagaacccttgcactagaggaaccctacaccccaaccctggggggaatgtagggaagaggtggccaagccaaccgtggggttagctctaattattaagatatgcattataaataaataccaaaaaattgtctctggcaatagttaccttcccagatacaggtccccccttttttcccctaactcttttaagcaatgattgtaactattaggagacattgctctcccacgtatgtttttctttttagacaatgcagacaccaggaagttgtggagctaggatccatcctattgtcaatgagatgttctcatccagaagccatagaatcctgaataataattctaaaagaaacttctggagatcatctggcaatcgcttttaaagactcggctcaccgtgagaaagagtcactcacatccattcttcccttgatggtccctattcctccttcccttgcttcttggacttcttgaaatcaatcaagactgcaaaccctttcataaagtcttgccttgctgaactccctctctgcaggcagcctgcctttaaaaatagttgctgtcatccactttatgtgcatcttatttctgtcaacttgtattttttttcttgtatttttccaattagctcctcctttttccttccagtctaaaaaaggaatcctctgtgtcttcaaagcaaagctctttactttccccttggttctcataactctgtgatattgctctcggtgcttccaactcatccacgtcctgtctgtttcctctgtatacaaaaccctttctgcccctgctgacacagacatcctctatgccagcagccagccaaccctttcattagaacttcaagctctccaaaggctcagattataactgttgtcatatttatatgaggctgttgtcttttccttctgagcctgcctttctccccccacccaggagtatcctcttgccaaatcaaaagactttttccttgggctttagccttaaagatacttgaaggtctaggtgctttaacctcacataccctcacttaaacttttatcactgttgcatataccagttgtgatacaataaagaatgtatctggattttgtgcctagttcctagcacacagcttcaaaaattctagagtttcctgataggagtgtcttttgtattcataacaagcccttttcacccatgcctgggtttatgctaacaaggttacccatggtgggcccttagtttcaaggaaggagttggccaagccagaaagaccaagcatgtggttaaagcattggaattttcagccccatcccacccccaatctccaaggaggtgatggggctggaaattgagttcaattttaacatggccagtgatttaagcaatgctgcctatgtaaagaaaccccaataaaaactctggacagtgaggcttggggagcttcctgattggcagacattccaatgtactaggaaggtagcgcatcttgattccacagggacaaaggctcctgagctctgggcccttccagtgcttgccaccctacatactctttgtctggctcttcatttgtattctttataataaaatggtgattgt

SEQ ID NO: 151 - DNA, 3113 bp, Homo sapiens
  misc_feature: Incyte ID No: 346511.6
cggcagccagctgagagcaatgggaaatggggagtcccagctgtcctcggtgcctgctcagaagctgggttggtttatccaggaatacctgaagccctacgaagaatgtcagacactgatcgacgagatggtgaacaccatctgtgacgtcctgcaggaacccgaacagttccccctggtgcagggagtggccataggtggctcctatggacggaaaacagtcttaagaggcaactccgatggtacccttgtcctcttcttcagtgacttaaaacaattccaggatcagaagagaagccaacgtgacatcctcgataaaactggggataagctgaagttctgtctgttcacgaagtggttgaaaaacaatttcgagatccagaagtcccttgatgggttcaccatccaggtgttcacaaaaaatcagagaatctctttcgaggtgctggccgccttcaacgctctgagcttaaatgataatcccagcccctggatctatcgagagctcaaaagatccttggataagacaaatgccagtcctggtgagtttgcagtctgcttcactgaactccagcagaagttttttgacaaccgtcctggaaaactaaaggatttgatcctcttgataaagcactggcatcaacagtgccagaaaaaaatcaaggatttaccctcgctgtctccgtatgccctggagctgcttacggtgtatgcctgggaacaggggtgcagaaaagacaactttgacattgctgaaggcgtcagaaccgtactggagctgatcaaatgccaggagaagctgtgtatctattggatggtcaactacaactttgaagatgagaccatcaggaacatcctgctgcaccagctccaatcagcgaggccagtaatcttggatccagttgacccaaccaataatgtgagtggagataaaatatgctggcaatggctgaaaaaagaagctcaaacctggttgacttctcccaacctggataatgagttacctgcaccatcttggaatgttctgcctgcaccactcttcacgaccccaggccaccttctggataagttcatcaaggagtttctccagcccaacaaatgcttcctagagcagattgacagtgctgttaacatcatccgtacattccttaaagaaaactgcttccgacaatcaacagccaagatccagattgtccggggaggatcaaccgccaaaggcacagctctgaagactggctctgatgccgatctcgtcgtgttccataactcacttaaaagctacacctcccaaaaaaacgagcggcacaaaatcgtcaaggaaatccatgaacagctgaaagccttttggagggagaaggaggaggagcttgaagtcagctttgagcctcccaagtggaaggctcccagggtgctgagcttctctctgaaatccaaagtcctcaacgaaagtgtcagctttgatgtgcttcctgcctttaatgcactgggtcagctgagttctggctccacacccagccccgaggtttatgcagggctcattgatctgtataaatcctcggacctcccgggaggagagttttctacctgtttcacagtcctgcagcgaaacttcattcgctcccggcccaccaaactaaaggatttaattcgcctggtgaagcactggtacaaagagtgtgaaaggaaactgaagccaaaggggtctttgcccccaaagtatgccttggagctgctcaccatctatgcctgggagcaggggagtggagtgccggattttgacactgcagaaggtttccggacagtcctggagctggtcacacaatatcagcagctctgcatcttctggaaggtcaattacaactttgaagatgagaccgtgaggaagtttctactgagccagttgcagaaaaccaggcctgtgatcttggacccagccgaacccacaggtgacgtgggtggaggggaccgttggtgttggcatcttctggcaaaagaagcaaaggaatggttatcctctccctgcttcaaggatgggactggaaacccaataccaccttggaaagtgccgacaatgcagacaccaggaagttgtggagctaggatccatcctattgtcaatgagatgttctcatccagaagccatagaatcctgaataataattctaaaagaaacttctggagatcatctggcaatcgcttttaaagactcggctcaccgtgagaaagagtcactcacatccattcttcccttgatggtccctattcctccttcccttgccttcttggacttcttgaaatcaatcaagactgcaaaccctttcataaagctgccttgctgaactcctctctgcaggagccctgcttaaaatagttgatgtcatcactttatgtgcatcttatttctgtcaacttgtattttttttcttgtatttttccaattagctcctcctttttccttccagtctaaaaaaggaatcctctgtgtcttcaaagcaaagctctttactttccccttggttctcataactctgtgatcttgctctcggtgcttccaactcatccacgtcctgtctgtttcctctgtatacaaaaccctttctgcccctgctgacacagacatcctctatgccagcagccagccaaccctttcattagaacttcaagctctccaaaggctcagattataactgttgtcatatttatatgaggctgttgtcttttccttctgagcctgcctttctccccccacccaggagtatcctcttgccaaatcaaaagactttttccttgggctttagccttaaagatacttgaaggtctaggtgctttaacctcacataccctcacttaaacttttatcactgttgcatataccagttgtgatacaataaagaatgtatctggattttgtgcctagttcctagcacacagcttcaaaaattctagagtttcctgataggagtgtcttttgtattcataacaagcccttttcacccatccctgggtttatgctaacaaggttacccatggtgggcccttagtttcaaggaaggagttggccaagccagaaagacaagcatgtggttaaagcatggaattttcagcccatccac

SEQ ID NO: 152 - DNA, 398 bp, Homo sapiens
  misc_feature: Incyte ID No: 331233.2
  unsure 352: a, t, c, g, or other
ccgatgagggcctggtctatgtgggggcagtcttcgttcgccagcgcggccttcgccacctccccattcagtttggaatctgctctgttaatttctaaaatttcttcctgggccagcggacatgtgtcactctgagtactgtggtgtggagagtttacgacagatttacaataattgggagatcccagctgcggtggccgcggaatatgcttcttttttttctttggtagtttctgcttagccatggctaaggagtaatacatcccgaaattgttcacgatgacgggcacggggcatggcgatggtgagcacgcccgccagcgcacacagagcccccaccagcatgccggancacgtctgcgggtacatgtctccatagcccagggtcgtcatggtga

SEQ ID NO: 153 - DNA, 2461 bp, Homo sapiens
  misc_feature: Incyte ID No: 234056.5
tgaagccgcagccgcccggctaggccccgggcggctctagcccagggcggcccgcggggcgctgggcctggctcccggcctccggtttccgggccggcgggtggccgctcaccatgcccggcaagcaccagcatttccaggaacctgaggtcggctgctgcgggaaatacttcctgtttggcttcaacattgtcttctgggtgctgggagccctgttcctggctatcggcctctgggcctggggtgagaagggcgttctctcgaacatctcagcgctgacagatctgggaggccttgaccccgtgtggctgtttgtggtagttggaggcgtcatgtcggtgctgggctttgctggctgcattggggccctccgggagaacaccttcctgctcaagtttttctccgtgttcctcggtctcatcttcttcctggagctggcaacagggatcctggcctttgtcttcaaggactggattcgagaccagctcaacctcttcatcaacaacaacgtcaaggcctaccgggacgacattgacctccagaacctcattgactttgctcaggaatactggtcttgctgcggagcccgaggccccaatgactggaacctcaatatctacttcaactgcactgacttgaaccccagccgggagcgctgcggggtgcccttctcctgctgcgtcagggaccctgcggaggatgtcctcaacacccagtgtggctacgacgtccggctcaaactggagctggagcagcagggcttcatccacaccaaaggctgcgtgggccagtttgagaagtggctgcaggacaacctgattgtggtggcgggagtcttcatgggcatcgccctcctccagatctttggcatctgcctggcccagaacctcgtgagtgacatcaaggcagtgaaagccaactggagcaaatggaatgatgactttgaaaaccactggcttacgcccaccatttccgaggtcctgtccacggcggggcctcagcagaactctctgactggggcccctggcccggccccacccagccgacatgttttctttggcctgggtggtttataccctgagccaacctttaaaaattggtagatttcacataaaagtccagatccacagcttctcttgaagaatgaccacctggctacgccggctcttcggtggcaacactacctgggacactgcctccccagtcaccaagggccccagctggcccgttctactcacctaagtgccgcctgacccttgtacactaggagctggcctcccacctctgcagggttatttcctgcacctcgaggccgctgcgggccaatctggagtgaaacacggggacctgaaggatggagaggctggaccccgctttgaagagggtgcagcctgggaagggcggccttgctggggactgcggtgggagtagagtgcccaggagagggtctgaggggtgggatgggggtcaggacaattttgcaaaagaagtagctggaagccatgggactggcgggagcctgtttgggggatctggatggttgactcctaggagtcaagttcagcatcttcgccgtggctgcagagctgcctgatgggcactagagggcacgccagccccacactccctgggtctggcttcctcccgcaacctcactctagtagagcctgtgcctgcctactagcgctctggggttcggagagtttgggaatttctcagagccaactggctcaggcttgggaaggctggctgctgccctcagctccgcctcatcagctatgtgaaggggtgtgtatggagtgatcctgccgccccctccctgggctggtccagagatctcaaactccgatgcccctggggccacgtatgttgtgtaaatggatgaaacaggcccttgagttgggagcctgcttcactttgactttcccactgttgctggagacaaagacatcgtgatgagagaaagttcgcacaatctagtcggtaacagccactttccttgagaccaagagagtgcggtggggatgggggggagagcacgggtccccgtctgacagtggccgctgccatattcaggtgtagctaattgctctggtgtgggaatgcaggcctaatgacagaaatctggagaagccagaaatacagatttgtatgtgagatgtcctgattttttaagttgttggcagaaattaattcagaaatcaaatctgcaggccaaacaaggtgcaggacccagctttggccccatgcccctgtaggtccctctgggacagtcaccgctggggtcctggctgctctgtcattgagggatgctgggcactgctgccgggtggccagggtatggggcatgtgcccagcaatgtggctccttggccccgctggccagtgtcctgggcccctgacaggcgctggctgtgagtggtttgtacatgctacaataaatgcagctggcagcattgtg

SEQ ID NO: 154 - DNA, 922 bp, Homo sapiens
  misc_feature: Incyte ID No: 238118.1
atgagccactgagcccagccaggctttttctaattctatgctttattctataaattcctctgcttctaagcctcacagcttccaactgcctttgatttcagatccaaattcctctgattctataattcagcctccaaatgcttctgattctggaatctagacttttccctaaagattcctctggttctgaatcttataacctcaactccctaattccagaccccagcctcctaaatctattctgggcttcccaccccactgaacttacccaattccttctttcagtcttaagttttcccattctagacccctaccctctaggctgtgctgctcctggacttcatgcctctccattctcattgcctacaatctctgtgccccagaaccccctccacttcccaccccagccctccagacatgcacttaccttgactttaccccacatgtttggggcacctggggctccctcaccccttgggtggtttgcaatctgaagacttctccagccacacaggcacatgcacaggcacggtgctgtctgcatattgccaggtggggagagaagccaggacccctcagctgtctgccaccatctatgtgcctcccttaccccccagctttctttctacagatggtgctactcttggtctcccacaggaaaaggcctccccccttcttagccccatttaccccgtttgtggaaggcactgctcgctctgttttgtcagagagtggcctatccagattggtgctatgggggggtctgacccctccctcctccctctggaggtgatgtgggccctcaatggagggaattgtgctgggctagggaaaggggagggactagactggccacactggctctgaaactcaccaatctctatacaccataaagacctcaccttggtaggcaccagaaaaa

SEQ ID NO: 155 - DNA, 3270 bp, Homo sapiens
  misc_feature: Incyte ID No: 233596.5
  unsure 1939-2054: a, t, c, g, or other
gccatggcgaccgcggagcccagcgggcgcgcgttgcggttgtctaccccgggaccccggcccagcggggcttcgggaccgcgcgccgggagctgcggggccaccctccgggcagatcggtaatagagccctccgtctgggggagcgcacccccgcggccgtggaaaagcgggggccatacatggtgacgcgcgcaccctccattcaagccaagctgcagaagcaccgggacctggccaaggccgttctgcggagaaaaggcatgctgggggcctcgccgaaccgcccagactcttcagggaaaaggtcagtgaagtttaacaagggctatactgctcttagccagagtccagatgaaaacctggtgtccctcgactctgacagtgatggggagctgggatccagatactcctccgggtattcatctgcagagcaggtgaaccaggatgtgagccggcagctgcttcaggatgggtatcacctggatgagattccagatgacgaggacttggacctcatcccccctaagcccatggcctcttcaacatgctcctgctgctggtgctgtcttggggactcttcttcctgtaccctccagtagacattaccctccaaggtgggccctgctcaccatgaggcctacagagccctgttggccactcatagctcacacagtgcagtgagcactgaagtcactgacccctagaaagtgacctgcaggtagcccttacctgttgcttctcaggccagaggcccccatctgggctgtgggctgataggtagaattctgtagttttcctctgctgttggagcagagtttggagaagtcactttaataagggcaagacagaaaattctggttcttatggtgggtgacaaaggtggctaaggaaaacacttgcagacagcttgattggtatttgtcatagtgcttcagggaggcaaaaagggagctcttgtgcccaggctgtgctagatagtgttgaatggaggcagaaaatagcactttatggtttattatagctggcaatccaaaaaaagaaactgtttgagaccagttcgagaaattccatttgctctattcttcctagctctaagatggtttgcaggcttgaccttcaagacagcataaagtgagtccttttgtccctcttcaggttgcacctgtctaactatgacagggatcatagcaggttgcttaatgatacagcaggatcctggcttccagaatccctggacctggggcatccccaactggtccaaccgtccgggtgagtttagtgattctggtttgcccttccctagttagagaaaaactgctctgacatgttcatatttatttatttgtatttccttggtctgggtgagtttcttcacccagtctttgagctaaagattaggtcgaaggtactggggctggccccagaagcctgcagtttttattattaccagcagagggagctacagggagcagtccggtgccttcctattgtttactttttaaacttttgagaagtagcaatggactcgtgagagtgggtatacagctgtgtgggctttgtcctagactgaggcttacagacaggaagggtaagagagacctaagccagctcctagacccttgcctgaggaaatcagtccaccagtgtagagggcctcccttcactccagcatggaccattctattgccagattcttctggtcacagcatgggccttactggatactcaggattgggctttaagcagacctctgggtgtgacacagcctctttcagcccccagcccaaacagcagaaataggcataatttctgctgtgacaccccctacccacaaattggagagtatatcttgctatactctataccaagcctctttctagaatttttccaacaggttttgttttgttttttggcttaactcagaaccatggtgagcnnnnnnnnnnnnnnnnnnnnnnnnnnnnnnnnnnnnnnnnnnnnnnnnnnnnnnnnnnnnnnnnnnnnnnnnnnnnnnnnnnnnnnnnnnnnnnnnnnnnnnnnnnnnnnnnnnnnggtgagctttgaatgggcatagacagggttcccagcccaatagtcgggattggggtataggttctacatgggaaagtatccagtctcttgctttactcagtgtcctgtgaccaccagaggcatgagagggacaacacactcttttcgctctaccacaaggggtgactagaagatgagcaagtctaataaaaagatacggccttatttgttatttgtctgacaaccatccttacgatggtaatcctgtgagtgcctgatggacatctatctttgtgtttttctcaaaccatggaaggttgagaggaatatacagtatctgggggctgacttactctactagctaggagcatcacagcagagagataggacagagaccagagtcatgccagcttggggtcttgggaagagaggcagatggttactctgttctggaatgggactctgcagctctatgcagtggccaacattctgagcactttgtgcaaatgcttgtagagctcaagaacgtctccatccagaaccccttccccatctgcagagaccatgtccaggcctttcttgtgtctgcagaggtgaagtgcacatgtggaaagggatcaaatgtagcacagtgtaaagaaagacagcaacacaggtagagggacccagtgtgtgctgggaggtggctgtggaaggtaagtatagacctacatctctgttggggaggtggtcagggcagaatggcctgggtgtttagcagcttctaggggtgagggtggcaggaccccaaaaccaaggccctctgcatcgttgttgtaataatcagctctggcatattcagctgcaactgtccctgaagaagaggtttctgagctggctgaccccatgtaggagggtgttaccttgtagaaaaagctggagggacctggtgggacagtgcagtgaggcagggtagaaatggtcagttgtttagggccagtggccacataccaaaataccaccaatgtgcccagggccaaactgccttaattctgagtgctgtgtgttctgcaggtgacagtttcctgaggagaggggtgtatccaggcttacctcccagcaggagtggtaccatatggtgtttatgtactactctatagaactcttggcttgcacttctacagctctgtacatttataagaataaatgcaatcacactagttgagctgtgtctgtgttgcagtggattttaaaggcc

SEQ ID NO: 156 - DNA, 4035 bp, Homo sapiens
  misc_feature: Incyte ID No: 988653.1
  unsure 2626, 3304-3502: a, t, c, g, or other
gagatcccagcgctgcagaacttggggagccgccgccgccatccgccgccgcagccagcttcctgccgccgcaggaccggcccctgccccagcctccgcagccgcggcgcgtccacgcccgcccgcgcccagggcgagtcggggtcgccgcctgcacgcttctcagtgttccccgcgccccgcatgtaacccggccaggcccccgcaactgtgtcccctgcagctccagccccgggctgcacccccccgccccgacaccagctctccagcctgctcgtccaggatggccgcggccaaggccgagatgcagctgatgtccccgctgcagatctctgacccgttcggatcctttcctcactcgcccaccatggacaactaccctaagctggaggagatgatgctgctgagcaacggggctccccagttcctcggcgccgccggggccccagagggcagcggcagcaacagcagcagcagcagcagcgggggcggtggaggcggcgggggcggcagcaacagcagcagcagcagcagcaccttcaaccctcaggcggacacgggcgagcagccctacgagcacctgaccgcagagtcttttcctgacatctctctgaacaacgagaaggtgctggtggagaccagttaccccagccaaaccactcgactgccccccatcacctatactggccgcttttccctggagcctgcacccaacagtggcaacaccttgtggcccgagcccctcttcagcttggtcagtggcctagtgagcatgaccaacccaccggcctcctcgtcctcagcaccatctccagcggcctcctccgcctccgcctcccagagcccacccctgagctgcgcagtgccatccaacgacagcagtcccatttactcagcggcacccaccttccccacgccgaacactgacattttccctgagccacaaagccaggccttcccgggctcggcagggacagcgctccagtacccgcctcctgcctaccctgccgccaagggtggcttccaggttcccatgatccccgactacctgtttccacagcagcagggggatctgggcctgggcaccccagaccagaagcccttccagggcctggagagccgcacccagcagccttcgctaacccctctgtctactattaaggcctttgccactcagtcgggctcccaggacctgaaggccctcaataccagctaccagtcccagctcatcaaacccagccgcatgcgcaagtaccccaaccggcccagcaagacgcccccccacgaacgcccttacgcttgcccagtggagtcctgtgatcgccgcttctcccgctccgacgagctcacccgccacatccgcatccacacaggccagaagcccttccagtgccgcatctgcatgcgcaacttcagccgcagcgaccacctcaccacccacatccgcacccacacaggcgaaaagcccttcgcctgcgacatctgtggaagaaagtttgccaggagcgatgaacgcaagaggcataccaagatccacttgcggcagaaggacaagaaagcagacaaaagtgttgtggcctcttcggccacctcctctctctcttcctacccgtccccggttgctacctcttacccgtccccggttactacctcttatccatccccggccaccacctcatacccatcccctgtgcccacctccttctcctctcccggctcctcgacctacccatcccctgtgcacagtggcttcccctccccgtcggtggccaccacgtactcctctgttccccctgctttcccggcccaggtcagcagcttcccttcctcagctgtcaccaactccttcagcgcctccacagggctttcggacatgacagcaaccttttctcccaggacaattgaaatttgctaaagggaaaggggaaagaaagggaaaagggagaaaaagaaacacaagagacttaaaggacaggaggaggagatggccataggagaggagggttcctcttaggtcagatggaggttctcagagccaagtcctccctctctactggagtggaaggtctattggccaacaatcctttctgcccacttccccttccccaattactattccctttgacttcagctgcctgaaacagccatgtccaagttcttcacctctatccaaagaacttgatttgcatggattttggataaatcatttcagtatcatctccatcatatgcctgaccccttgctcccttcaatgctagaaaatcgagttggcaaaatggggtttgggcccctcagagccctgccctgcacccttgtacagtgtctgtgccatggatttcgtttttcttggggtactcttgatgtgaagataatttgcatattctattgtattatttggagttaggtcctcacttgggggaaaaccacaaaaggaaaagccaagcaaaccaatggtgatcctctattttgtgatgatgctgtgacaataagtttgaacctttttttttgaaacagcagtcccagtattctcagagcatgtgtcagagtgttgttccgttaacctttttgtaaatactgcttgaccgtactctcacatgtggcaaaatatggtttggtttttcttttnttttttttttgaaagtgttttttcttcgtccttttggtttaaaaagtttcacgtcttggtgccttttgtgtgatgcgccttgctgatggcttgacatgtgcaattgtgagggacatgctcacctctagccttaaggggggcagggagtgatgatttgggggaggctttgggagcaaaataaggaagagggctgagctgagcttcggttctccagaatgtaagaaaacaaaatctaaaacaaaatctgaactctcaaaagtctatttttttaactgaaaatgtaaatttataaatatattcaggagttggaatgttgtagttacctactgagtaggcggcgatttttgtatgttatgaacatgcagttcattattttgtggttctattttactttgtacttgtgtttgcttaaacaaagtgactgtttggcttataaacacattgaatgcgctttattgcccatgggatatgtggtgtatatccttccaaaaaattaaaacgaaaataaagtagctgcgattgggtatgtgtttcctgggttaggggaaggactctgccctattgagggctgtgaggttttctgaagacttggcctttagagatacaaggatcctccagccagagtcaggcccactgtgtgaaactggagttcgttatttatgaggactgagtatgggnnnnnnnnnnnnnnnnnnnnnnnnnnnnnnnnnnnnnnnnnnnnnnnnnnnnnnnnnnnnnnnnnnnnnnnnnnnnnnnnnnnnnnnnnnnnnnnnnnnnnnnnnnnnnnnnnnnnnnnnnnnnnnnnnnnnnnnnnnnnnnnnnnnnnnnnnnnnnnnnnnnnnnnnnnnnnnnnnnnnnnnnnnnnnnnnnnnnnnnttcttgataatgggcctgttcctcttcagtctgttgggctgaagctttaccttggttagctaaagccaagaaaggcaagagttagggctgggacatgtgtggccaaaggcagtgttactctcctggcatcaaatgttgggccagtcccgtcccccacctctactcagggttggaaaacccatgatcttgggaatccctgccatgtgcagttagaggaggtaagaagtaggcacaaggcctttaggggaacagtaacaatgctggggccgactcagcctctccctcccattccccaggtccccagcaacttgagggcatcaaagaagcctagacgaggtaaaggccagttctcaagccaagaatccttccaggaagaaattcttattacttgccagctggaactgccatccttggcagcttcgtgggacaaaggatagagtgggcagaagcctggcctggtgtctaaagttcccatccgggccaaatctgttcccattgtgtaggaggcctgaggttctaggttcttttgggcc

SEQ ID NO: 157 - DNA, 1870 bp, Homo sapiens
  misc_feature: Incyte ID No: 470468.26
agggtacacacagtgacagtgccagctccacattcccgaccaccgggccagggctggttccacgctgtcatttctctccgctggccccagccgcggggccaccgccagacagacagaccggggatcctgcctggcggcgtgaccttgggttagtcctagagccgcttctagcccggtttcctccgccccaggttaggaccacgtgggtggttccctcattcgagtgctccggcgcacagacccgcgccccgccgtctgcgagcctcccgagagccgtcccttcgtccggccctggagcattgcgtttgtcgccggtgtcgcagtgcgaggatggcgccgcgggtgtagcggctctctgcgcaggccgagtgggcccagagaagcgaggaactccgcagctcgtcgacacgtctcgtctcctgtcccaattcagggcttggtgaggtgactcgcggtcgcgggtgactcgccggcaggacactgcctggaacgcctggagcgcctcccactgcagacgtctgtccgcctccagccgctctcctctgacgggtcctgcctcagttggcggaatggcggccacgggagccaatgcagagaaagctgaaagtcacaatgattgccccgtcagacttttaaatccaaacatagcaaaaatgaaagaagatattctctatcatttcaatctcaccactagcagacacaatttcccagccttgtttggagatgtgaagtttgtgtgtgttggtggaagcccctcccggatgaaagccttcatcaggtgcgttggtgcagagctgggccttgactgcccaggtagagactatcccaacatctgtgcgggaactgaccgctatgccatgtataaagtaggaccggtgctgtctgtcagtcatggtatgggcattccttctatctcaatcatgttgcatgagctcataaagctgctgtactatgcccggtgctccaacgtcactatcatccgcattggcacttctggtgggataggtctggagcccggcactgtggtcataacagagcaggcagtggatacctgcttcaaggcagagtttgagcagattgtcctggggaagcgggtcatccggaaaacggaccttaacaagaagctggtgcaggagctgttgctgtgttctgcagagctgagcgagttcaccacagtggtggggaacaccatgtgcaccttggacttctatgaagggcaaggccgtctggatggggctctctgctcctacacggagaaggacaagcaggcgtatctggaggcagcctatgcagccggcgtccgcaatatcgagatggagtcctcggtgtttgccgccatgtgcagcgcctgcggcctccaagcggccgtggtgtgtgtcaccctcctgaaccgcctggaaggggaccagatcagcagccctcgcaatgtgctcagcgagtaccagcagaggccgcagcggctggtgagctacttcatcaagaagaaactgagcaaggcctgagcgctgccctgcacctccgcagacctgctgtgatgacttgccattaaaagcattgtccaaaatcccctgttgtgtggactttgagcacactttacacaagaatctagaaaatcagatcgcgattaagagacagagaatcttggattaaccgcatgggagatgttcttccttttgaagtttcattggagcattttcaatgatgttagcctgatttggggtttcttcaagaacattctaccaaatttttgtactatttctagggaaatttttcagactttaaaattctaatggtagtcagatttcatgtcactaaacaagaaatctgacaatagtgccagataactaagttcttgatcacttactactta

SEQ ID NO: 158 - DNA, 824 bp, Homo sapiens
  misc_feature: Incyte ID No: 470468.25
gattacaggcgtgggccactgcacccagccctctactttgttttttgtgcctttctcttccatagtgtccataatgatcatgcattaattactttcatagcttaaaaaaaagttgaatgggaaaaatgggtcactgtgtatttgagaacagtactggatgcttcgtgtttggatgtgtgggtggatctgcttctttcttccatatgctctgctgtgtgctccctggctgccctgctttaattttattttgttttacaccctgcatatcttgatgtctgcttttttcctcaggtctggagcccggcactgtggtcataacagagcaggcagtggatacctgcttcaaggcagagtttgagcagattgtcctggggaagcgggtcatccggaaaacggaccttaacaagaagctggtgcaggagctgttgctgtgttctgcagagctgagcgagttcaccacagtggtggggaacaccatgtgcaccttggacttctatgaagggcaaggccgtctggatggggctctctgctcctacacggagaaggacaagcaggcgtatctggaggcagcctatgcagccggcgtccgcaatatcgagatggagtcctcggtgtttgccgccatgtgcagcgcctgcggcctccaagcggccgtggtgtgtgtcaccctcctgaaccgcctggaaggggaccagatcagcagccctcgcaatgtgctcagcgagtaccagcagaggccgcagcggctggtgagctacttcatcaagaagaaactgagcaaggcctgagcgctgccctgcacctccgcagacctgctgaagtga

SEQ ID NO: 159 - DNA, 7536 bp, Homo sapiens
  misc_feature: Incyte ID No: 903479.3
  unsure 3017-3175, 5473, 5489, 5500, 5504, 6570: a, t, c, g, or other
cggagagctttggggactgcatcccatcatatgtccagatgaatggatctttgctgacatggaattgctaagaaaagtagtagtccctgggatccgtatgtccattaaacttcatcaggatcattttacttctccagatgaatatgatgaccctactgtgctctatgaagccatagtatctcatgagaagaacctcgtaatagcccatgaaggggaccctgcatggcggagtgcagtacttgccaactctccctccttgcttgctctgcggcatgtcatggatgatggcaccaatgaatataaaatcatcatgctcaacagacgctacctgagcttcagggtcattaaagtgaataaggaatgtgtccgaggtctttgggcagggcaacagcaggagcttgtttttctacgtaaccgtaacccagagagaggtagcatccaaaatgcaaagcaagccctgagaaacatgataaactcatcttgtgatcaacctattggctacccaatctttgtctcacccctgacaacttcttactctgacagccacgaacagcttaaagacattcttgggggtcctatcagcttgggaaatatcaggaacttcatagtgtcaacctggcacaggcttaggaaaggttgcggagctggatgtaacagtggtggcaatattgaagattctgatactggaggtgggacttcctgcactggtaacaatgcaacaactgccaacaatccccacagcaacgtgacccagggaagcattggaaatcctgggcagggatcaggaactggactccacccacctgtcacatcttatcctccaacactaggcactagccacagctctcactctgtgcagtcgggcctggtcagacagtctcctgcccgggcctcagtagccagccagtcttcctactgctatagcagccgacattcatccctccggatgtccaccactgggtttgtgccttgtcggcgctcttctactagtcagatatcgcttcgaaacttgccatcatccatccaatcccgactgtcgatggtgaaccaaatggaaccctcaggtcagagcggcctggcctgtgtgcagcacggcctgccttcctccagcagctccagccaaagcatcccagcctgcaaacatcacactctcgtgggctttcttgcgacagagggaggtcagagcagtgccactgatgcacagccaggcaacaccttaagtcctgccaacaattcacactccagaaaggcagaagtgatttacagagtccaaattgtggatcccagtcaaattctggaagggatcaacctgtctaaaaggaaagagctacagtggcctgatgaaggaatccggttaaaagctgggagaaatagctggaaagactggagtccgcaggagggcatggaaggccatgtgattcaccgatgggtgccttgcagcagagatccaggtaccagatcccacatcgacaaggcagtgcttctggtccagattgatgataaatatgtgactgtaattgaaactggggtactagaacttggggctgaagtgtgagccagtgtttattataaagacatttctttttccctctcaattccaaggcattggaaaaagagaggaacaagcagaagatgcctgcaggtatcactttgatcctatgtgggagcgactgaaaatagaatgagcttggttaagcacctctcctttgcccttcaccctgactcctgtcactgtctccatccccaaataaagctgaaatatttttttaagttagctgccgagaaaacattttgcatgaaggataaagttctgttaaaatacatccttaaaaaaagtttttcctatgcattgcctatgctttaaatcaacaaactcttcatttctaaactatgatctcatatttttctaatttctttgccaaaaataattgccatgttttgtcatagaacatgaaattcatttaccttgatttttaagaacagaccagtgtagaaatgttccttttgacttatagcagtataaaagtttaatgtacagtgaaagagactatgaacagacatagatttatcttattccttgagcgctaaaaactttaataaaaaaaactgcactaattttttacagcaatgcactaaagtctgagatttctcagaacatttatttatatataaaaataaaataccattatttaaattgccttgggattagccccttccctttccttataaacacaggtagcaggaactgtgctgctcatttttctgttagtagtgtgtacttcatgccaggacattgggtattttctttaaagtgaatatagaatctcaagatatacgtagcttcatcattgacatttcccagagccaatagtcagcggatcggtcttgtgaacaccactgccagctcctgtgtctacatctcagaggagcccatgtgctctgcttctctccaccagagcaagctctgctgggcgtgcttctgggaagaaaacaattttctttaagaagaagatgaatgtccaggaatttaaagaaaggatcgattgccttttatttatgagtttctagctcttgaagttattcacatgcagttcagttagtcaagtaaaattttttttcaaataaaagtatccaagtggtgcagttattattatatccctctttaataattttgctttttatttttcccctcttctttttctgttacttgaattttatttcctgtaatttatagtgtgtagctgtaaattgaaatatttataactgtgaaattgacttaattcatatgttgtctcataactttattttttttaaatgcatattcagggaaatatattactcatatttacaattgggcgatataggaacttcaatttagatttaatttgcaactcttagcattttttaaatccttgataaaattttcccttttggtgtgaaactccaaagaaaattgtacatctcctctgagcatttaggagcagccatctttctaccccttgtgaataaatcattgnnnnnnnnnnnnnnnnnnnnnnnnnnnnnnnnnnnnnnnnnnnnnnnnnnnnnnnnnnnnnnnnnnnnnnnnnnnnnnnnnnnnnnnnnnnnnnnnnnnnnnnnnnnnnnnnnnnnnnnnnnnnnnnnnnnnnnnnnnnnnnnnnnnnnnnnnnnnnnntttgttgaggtgacagaagagagaagctgtttttcctaccaattctgatgtagatctcacattatagcataacattacagtagaaggaatgaaaactaagaaagtaaatagtgaacatacagaacttactgcatttccactttaaaacctatttattttccctttttctaattttaaacttttgtggtcattcagaacctaatgtgccttgtgttgacatttccatagacttcacactttacaaaatttactgtttaaaaatacttgtcaaatgatttactgaacctttatacaaaagtaccctttctaaattgaccatttaaaaatgtatttttgtgataccgtcattatgttctgcatttgcctcattttggcagatctacagtatgccattaaagtttagtgttgtttttggttttggagggtttttttctgaaactgaatttataatctatttctctgtatacatatatttttaaaatcttctgaaaggaactatgttccctgctgcttcttccctttctgaagtgaatatgatcttttcatggtcattgcctagataaaagtagagccttttcaatcttagatggaagataattcattttcccacacagaaaaaaaatctgacctttacatgatttaatctgaagggctagaattttttaatttctagcccctcctccaaaaaaattttaaacacatcacatactctgaaaagtcagatttcaaatgcaagactagactttatatggaacatatatgttgggttttgattttgggtagcaattgacatatatttttctcaaaacaagttgaattttgttaacatatataattctttagtgaatttataaattaggacccctgagaagaagccctgttgtttttcttaagagtctaaaactgacaatcttttaaaaatcataatacttttctagtaattgcatcagggaattggtgataattgaagaaagatccatttcttaagaataatttgatctaaattattatatggaaataaacatacttgtgttaactaaattgatcataaattcttgttcctgcctcacccctcaccccccagagaatagtgagtgactcgtttagattctctgctttttttcagttatgtacaagacttcagcatacattaatgtctttagtttataaatttgccaatgctttaatttccataatttgaaagttaaaagatgtaactaaaatactagcttttttattcatttccttttggtggagttgtatgattgaaaactttgctttttcttgtttaattcttccgccaccccctcttttgagagaaaggtaatcgtggaatgagttataaattattgcctttttttcctttatttctttcattcagtggcaaaaaacattttataactcctaagtttttggttaatcttccaacttataccttggtgtgaactctctttttacaccattttcaacactggataaaactttaatgttgactttttgctaaagaactttaatttttccaagaatctagattaacataagatgttgatatttaaggaacttggaagagtaagtggtgaggctgtatgtatattttttaagagattaccttttaggaaattagtgaacaaacttaaccagtgttctgccttctttgactttgttactggaggatgataatctatttctattagattcgaagtattttggaaaatatttcaagtatatctgaactacttataattcttaaaacagaagtagtcagacaatatttgtatcctaagtgagatatggaaaattactctgtatactaaatgtcaggcaatgaaaatgtaagtttttgtgtagaaaacccattaagaagatgtgtttttctttctgaattagtttatttttccatcacataccaaaatataaaaatcagcctcacatttttcagcaagtttagcttatagccttgataaattcctctgtgcttctgagcagcatccttctgcctctgcttagcagctctgcatttggtggattgctgttgtgagtcattcatccagcactgggccttttaagctgaagattcacccagtgtctaaagttgtccttttcttatagctagctttcaagcatctttcctcctaaataaatatgtgacttgagaaaaaggtaataatgattttgtcagaattctttgaatttatatttactagctacttaaccataaactgctgtccagattgttaatttcatttatatttattttaattaatttgtcatgaatatggacaaagccttttctggggngtgtgtgtgtgtatanagtttgttttnaaantcgtcattattcattcgtattctttttctgtgtaatgtaatcatataaagttactttggacagagacccagttaattttctcttttgataggatacatggtttagataaggtataaagtgtccctttttattctagaggcttttcctttaattcagagattagtggagataataacatcagtcaaggctaatgtggtacatggaacttgctaatggaggttggacattctgtttcagtcttacatggatattgtttcattggtgttgaggaagaaaaaaattagatactaccatgcattgggacagcataattctaatattacattgaatatggctttttaaaaataagtattaaaaagccaatcgttttctccatttatctatcttttttgtttgtttttaatttggttgattgatatgcacccaggccgtcttatttttacttgttaaatgtctgtctaggaagaactgtgattggaaaggaattaattattatacaaataaatctggtaggatatgagtggagtaagtttgcttgaaacagaagtatattttctactttgaatcacctcaccagagtcatctgtcaagaattatgtataacaatttatctttattgcctacatacaacatactttttctgaattaagataacttctatttgtgagttgaacttcattatctgccattttgtggaatcaaccttacattctttggtggaactagagctgattgtcaccacaaggttatatgacaactctgttctaagacttatacctattatatagggttatacctttttttcttatgcctcagctctgtacctgacaatttatgattcagtggagccaagctagaaggaacaaaggtcatctaacactgtgatggggatgaattcctgagttttacctgcacaatgaggtggtgccccggaattcacaacagagtagtgatagagcataagatggctgctccagatgactcttgggtttagtgtacttgtgattgaacaagattttttatctatgaagcttgattctacaaccaaaataatagaaatgggggnggggggggaatcatgtctgcttatgctttttaaaagcttatagtttaagtaaaagtaaaatgtaaaaactgattaaacctatacaagtctggcaatgagctctgcatgaggaaatggaaggaggaatattgaaaatgattctaggaaagtgaacgtaagaaaggaaaatgggttttccttttctgatcatgggctctggaaagtattcatggcctttaccagcattcagtataaaccagagataaggacatatgtacttacgtgtgtctgtgagtgtgtgtgtgtctgagtgttattctgaacagcttgtaaatattgtagttgtttaaaatggaaaataaaagctgagttcttttggcaaatatattgcatcaaaaatacagtattgacagtggataaaacactgaggaaataaattttttttcattttgccttctgtccattttttgtcaaactgagaaaaattagagtacactatattaagttctgtatggcatgttcacacttggttctgaaatcattttaaacaagctttggcctgtaaacatgagcttcaacttgcaatagatcaaaagcgtacatcatacttcatgttaaaacatggtctgtttcacacttttcttagtgcaagggttgtagtttgtcttctgaatttatctcgatgttacatattaacaatattagatagaacatgtaggataaaaatgtgtgttcaatcacagactaaactacaatacagaaaatggaaagaacatttggattatggtcatcaaaggcaggtacaaacttgtttggtatatttgcagtgtgtactaactcagtgatttcacatataatacagaaaatgcaagctaatttacaatgagaatagacatattcttgattaaatcacttataatcctttaatgcatcattttaactatttattagtaagaaccagaaccagcacgatacagattatatgcc

SEQ ID NO: 160 - DNA, 1034 bp, Homo sapiens
  misc_feature: Incyte ID No: 267918.1
tttctctcacgtgcctatggaggagagaacacacatagttggattgatccatacataattgggcgtttgcaggcaagtatgaggacaagaagacaaaaaagatgaaagtatttgtaggcatgattcaagattagagtcacagtgttcaagctgctcgctgatgaaaaggaagccaagaaagagctgtgagagtgaggagaggatggaagcctttaggttctccattcaatccaagaacggagcgggagagctgggaaggataacgggtttgcttagagggtaagatatgacatttaatacattcttcagaagtgagatgtttaaaggagtgaccaggttgactgtgtgaccatgagtatgagtaaatgaagtagaatgaaaatggtcaatgtagttgagaaagtcaaataatggtgagtattttaggatatagttgtgatttacaatttcaggtgtgggtcagtcagagtttgctgttgctgacatggttgacatgtttgttttactactgccaccagcaggaggagatgagctgcagggtatcaaaaggggtataatcgagatggcagatctggtagctgtaactaaatctgatggagacttgattgtgccagctcgaaggatacaagcggaatatgtgagtgcactgaaattactccgcaaacgttcacaagtctggaaaccaaaggtaattcgtatttctgcccgaagtggagaggggatctctgaaatgtgggataaaatgaaagatttccaggacctaatgcttgccagtggggagctgactgccaaacgacggaagcaacagaaagtttggatgtggaatctcattcaggaaagtgtgttagagcatttcaggacccaccccacagtccgggaacagattccacttctggaacaaaaggttctcattggggccctgtccccaggactagcagcagacttcttgttaaaagcttttaaaagcagagactaataaaattcatcctgtataataattttacatatcatttcataaagtattttaatagaaa

SEQ ID NO: 161 - DNA, 2642 bp, Homo sapiens
  misc_feature: Incyte ID No: 1094412.1
  unsure 2610: a, t, c, g, or other
ccaagacagcacagacagattgacctattggggtgtttcgcgagtgtgagagggaagcgccgcgggcctgtatttctagacctgcccttcgcctggttcgtggcgccttgtgaccccgggcccctgccgcctgcaagtcggaaattgcgctgtgctcctgtgctacggcctgtggctggactgcctgctgctgcccaactggctggccaagatgaagctctccctggtggccgcgatgctgctgctgctcagcgcggcgcgggccgaggaggaggacagaaggaggacgtgggcacggtggtcggcatcgacctggggaccacctactcctgcgtcggcgtgttcaagaacggccgcgtggagatcatcgccaacgatcagggcaaccgcatcacgccgtcctatgtcgccttcactcctgaaggggaacgtctgattggcgatgccgccaagaaccagctcacctccaaccccgagaacacggtctttgacgccaagcggctcatcggccgcacgtggaatgacccgtctgtgcagcaggacatcaagttcttgccgttcaaggtggttgaaaagaaaactaaaccatacattcaagttgatattggaggtgggcaaacaaagacatttgctcctgaagaaatttctgccatggttctcactaaaatgaaagaaaccgctgaggcttatttgggaaagaaggttacccatgcagttgttactgtaccagcctattttaatgatgcccaacgccaagcaaccaaagacgctggaactattgctggcctaaatgttatgaggatcatcaacgagcctacggcagctgctattgcttatggcctggataagagggagggggagaagaacatcctggtgtttgacctgggtggcggaaccttcgatgtgtctcttctcaccattgacaatggtgtcttcgaagttgtggccactaatggagatactcatctgggtggagaagactttgaccagcgtgtcatggaacacttcatcaaactgtacaaaaagaagacgggcaaagatgtcaggaaagacaatagagctgtgcagaaactccggcgcgaggtagaaaaggccaaacgggccctgtcttctcagcatcaagcaagaattgaaattgagtccttctatgaaggagaagacttttctgagaccctgactcgggccaaatttgaagagctcaacatggatctgttccggtctactatgaagcccgtccagaaagtgttggaagattctgatttgaagaagtctgatattgatgaaattgttcttgttggtggctcgactcgaattccaaagattcagcaactggttaaagagttcttcaatggcaaggaaccatcccgtggcataaacccagatgaagctgtagcgtatggtgctgctgtccaggctggtgtgctctctggtgatcaagatacaggtgacctggtactgcttgatgtatgtccccttacacttggtattgaaactgtgggaggtgtcatgaccaaactgattccaaggaacacagtggtgcctaccaagaagtctcagatcttttctacagcttctgataatcaaccaactgttacaatcaaggtctatgaaggtgaaagacccctgacaaaagacaatcatcttctgggtacatttgatctgactggaattcctcctgctcctcgtggggtcccacagattgaagtcacctttgagatagatgtgaatggtattcttcgagtgacagctgaagacaagggtacagggaacaaaaataagatcacaatcaccaatgaccagaatcgcctgacacctgaagaaatcgaaaggatggttaatgatgctgagaagtttgctgaggaagacaaaaagctcaaggagcgcattgatactagaaatgagttggaaagctatgcctattctctaaagaatcagattggagataaagaaaagctgggaggtaaactttcctctgaagataaggagaccatggaaaaagctgtagaagaaaagattgaatggctggaaagccaccaagatgctgacattgaagacttcaaagctaagaagaaggaactggaagaaattgttcaaccaattatcagcaaactctatggaagtgcaggccctcccccaactggtgaagaggatacagcagaaaaagatgagttgtagacactgatctgctagtgctgtaatattgtaaatactggactcaggaacttttgttaggaaaaaattgaaagaacttaagtctcgaatgtaattggaatcttcacctcagagtggagttgaaactgctatagcctaagcggctgtttactgcttttcattagcagttgctcacatgtctttgggtgggggggagaagaagaattgggccatcttaaaaagcgggtaaaaaacctgggttaggggtgtgtgttcaccttcaaaatgttctatttaacaactgggtcatgtgcatctggtgtaggaagttttttctaccataagtgacaccaataaatgtttgttatttacactggtctaatgtttgtgagaagcttctaattagatcaattacttattttaggaaatttaagactagatactcgtgtgtcgggtgangggagggagtattggtatgttgggataaggaa

SEQ ID NO: 162 - DNA, 2532 bp, Homo sapiens
  misc_feature: Incyte ID No: 1094107.1
caagacagcacagacagattgacctattggggtgtttcgcgagtgtgagagggaagcgccgcggcctgtatttctagacctgcccttcgcctggttcgtggcgccttgtgaccccgggcccctgccgcctgcaagtcggaaattgcgctgtgctcctgtgctacggcctgtggctggactgcctgctgctgcccaactggctggcaagatgaagctctccctggtggccgcgatgctgctgctgctcagcgcggcgcgggccgaggaggaggacaagaaggaggacgtgggcacggtggtcggcatcgacctggggaccacctactcctgcgtcggcgtgttcaagaacggccgcgtggagatcatcgccaacgatcagggcaaccgcatcacgccgtcctatgtcgccttcactcctgaaggggaacgtctgattggcgatgccgccaagaaccagctcacctccaaccccgagaacacggtctttgacgccaagcggctcatcggccgcacgtggaatgacccgtctgtgcagcaggacatcaagttcttgccgttcaaggtggttgaaaagaaaactaaaccatacattcaagttgatattggaggtgggcaaacaaagacatttgctcctgaagaaatttctgccatggttctcactaaaatgaaagaaaccgctgatgcttatttgggaaagaaggttacccatgcagttgttactgtaccagcctattttaatgatgcccaacgccaagcaaccaaagacgctggaactattgctggcctaaatgttatgaggatcatcaacgagcctacggcagctgctattgcttatggcctggataagagggagggggagaagaacatcctggtgtttgacctgggtggcggaaccttcgatgtgtctcttctcaccattgacaatggtgtcttcgaagttgtggccactaatggagatactcatctgggtggagaagactttgaccagcgtgtcatggaacacttcatcaaactgtacaaaaagaagacgggcaaagatgtcaggaaagacaatagagctgtgcagaaactccggcgcgaggtagaaaaggccaaacgggccctgtcttctcagcatcaagcaagaattgaaattgagtccttctatgaaggagaagacttttctgagaccctgactcgggccaaatttgaagagctcaacatggatctgttccggtctactatgaagcccgtccagaaagtgttggaagattctgatttgaagaagtctgatattgatgaaattgttcttgttggtggctcgactcgaattccaaagattcagcaactggttaaagagttcttcaatggcaaggaaccatcccgtggcataaaacccagatgaagctgtagcgtatggtgctgctgtccaggctggtgtgctctctggtgatcaagatacaggtgacctggtactgcttgatgtatgtccccttacacttggtattgaaactgtgggaggtgtcatgaccaaactgattccaaggaacacagtggtgcctaccaagaagtctcagatcttttctacagcttctgataatcaaccaactgttacaatcaaggtctatgaaggtgaaagacccctgacaaaagacaatcatcttctgggtacatttgatctgactggaattcctcctgctcctcgtggggtcccacagattgaagtcacctttgagatagatgtgaatggtattcttcgagtgacagctgaagacaagggtacagggaacaaaaataagatcacaatcaccaatgaccagaatcgcctgacacctgaagaaatcgaaaggatggttaatgatgctgagaagtttgctgaggaagacaaaaagctcaaggagcgcattgatactagaaatgagttggaaagctatgcctattctctaaagaatcagattggagataaagaaaagctgggaggtaaactttcctctgaagataaggagaccatggaaaaagctgtagaagaaaagattgaatggctggaaagccaccaagatggctgacattgaagacttcaaagctaagaagaaggaactggaagaaattgttcaaccaattatcagcaaactctatggaagtgcaggccctcccccaactggtgaagaggatacagcagaaaaagatgagttgtagacactgatctgctagtgctgtaatattgtaaatactggactcaggaacttttgttaggaaaaaattgaaagaacttaagtctcgaatgtaattggaatcttcacctcagagtggagttgaaactgctatagcctaagcggctgtttactgcttttcattagcagttgctcacatgtctttgggtgggggggagaagaagaattggccatcttaaaaagcgggtaaaaaacctgggttagggtgtgtgttcaccttcaaaatgttctatttaacaactgggtcatgtgcatctggtgtaggaagttttttctaccataagtgacaccaataaatgtttgttatttacactggtaagcg

SEQ ID NO: 163 - DNA, 4323 bp, Homo sapiens
  misc_feature: Incyte ID No: 218452.4
  unsure 3958-3980: a, t, c, g, or other
ggagccttctgaagtacctagtcagattagcaaagataattttttagaagttcctaatttatctgactctctttgtgaagatgaagaagttactttccaacctggtttctcccctcaaccaagtagacgaggttctgattcttctgaagacatatacctggataccccatcttcaggtactagaagagtttcatttgctgattcctttggattcaatcttgtgtctgttaaagaatttgattgctgggaattaccgagtgcttcaaccacttttgacttagggacggacattttccacacagaagaatatgttttagccccactgtttgacttgccttcttcaaaagaagatcttatgcaacaactccaaatacagaaagcaatactggagtcaactgagtctcttcttgggtctacaagtatcaagggtattattcgagttttgaatgtttcttttgagaagttagtatatgtaagaatgtctttagatgactggcagacacattatgacattttagcagaatatgttcctaattcatgtgatggtgaaactgaccagttctcctttaagattgtattggttcctccttatcaaaaagatggcagtaaagttgagttttgtatacgttatgaaacttctgttggtacattttggtcaaataataatggcacaaattatacattcatttgtcaaaagaaagaacaagagccggagcctgtaaaaccatggaaagaagttcctaacagacaaataaaaggctgcttaaaggtaaaatcaagtaaagaagaatcatcagtaacatcagaagaaaataactttgagaatccaaagaatacagatacctatatcccaacaatcatttgttctcatgaggacaaggaagatttggaagccagtaatcgaaatgtaaaagatgtaaacagggaacatgatgaacataatgaaaaagaattagagttgatgataaatcaacacttaataagaaccagaagtactgcttccagagatgaaaggaatacattttcaacagatccagtcaattttccaaataaagcagaggggttagagaagaagcaaatccatggtgaaatatgtactgacttgttccaaaggtctctgtctccaagttcatcagcagaaagctccgtaaagggagatttttactgcaatgaaaaatattcctcaggagatgactgtacacatcaaccttcagaggaaactacttcaaatatgggagaaatcaagccatcattgggagatactagtagtgatgaactagtgcaattacatactggcagcaaagaagtcctggatgataatgctaatccagcccatggcaatggcacaatgcaaataccttgcccctcttcagatcaactaatggcaggaaaccttaataaaaaacatgaaggaggagctaaaaaaattgaagtaaaagatttgggatgtttacgaagagatttccattcagatacgtcggcatgtctcaaagaatcaacagaagaaggatcttctaaggaagattattatggcaatggtaaggatgatgaagaacaaagaatatatttaggtgttaatgaaaaacaaagaaaaaatttccaaacaatcttacatgaccaagaaaggaagatgggtaaccctaaaataagtgtggcagggattggagctagtaacagagacctggctactctgctgagcgaacataccgcaatccccacccgggcaatcacagcagatgtgtctcattcaccaaggacaaatttaagttgggaagaagctgtgttaaccccagagcatcatcatttgactagtgaaggcagcgctttaggagggataactggtcaagtttgttcatcaagaactggaaatgttttgaggaatgattatcttttccaagttgaagaaaaatcaggtgggattaattctgaagatcaggataatagcccacagcataaacaaagttggaatgttctggaaagtcagggaaaatcaagagagaataagacaaacataacagagcatatcaaaggacaaacagattgtgaagacgtgtggggaaaaagagataatacgaggagtttgaaagctactacagaagaattgtttacctgccaagaaacagtgtgctgtgaactgtcttctctagctgatcatggcattactgagaaagcagaagctggtacagcctatataattaagacaacatcagaaagtactccagaaagcatgtctgctagagaaaaagcaataattgctaagctacctcaagagacagcacgaagtgacaggcccatcgaggtaaaggaaacagcgtttgatccacatgaagggagaaatgatgattcacattataccctttgtcaacgagatacagtaggtgtaatctatgacaatgattttgaaaaggaatcacgtttaggtatttgtaatgtacgtgtagatgaaatggagaaggaagaaaccatgtctatgtacaatcctaggaagacacatgacagggagaaatgtggcactggaaatataacatctgtggaagaatcctcatgggtcattacagaatatcaaaaagcaacttcaaaactggatttacagttgggaatgttaccaacagacaaaactgtattttcagaaaacagagatcataggcaggttcaagaattatcaaagaaaacagactcggatgccattgtgcattctgcttttaactcagacactaatagagctcctcagaatagctctcctttttccaaacatcatactgaaatttcagtgtcaactaatgagcaggcaattgctgtagagaatgcagttactaccatggctagccaacctatttctacgaaatcagaaaatatttgtaattcaacaagagaaatccagggtattgagaagcacccttatcctgagtctaaacctgaagaagtttccagaagttcaggaatagtgacatcaggtagtagaaaagaaagatgcataggccagattttccaaacagaagagtatagtgtggaaaaatctctagggccaatgattttaatcaacaaacctcttgagaatatggaagaagcaaggcatgaaaatgaaggattagtaagctctgggcaatcactatacacttcaggtgaaaaggaatctgacagctctgcttctactagtcttcctgttgaggaaagtcaagctcaaggcaacgaatctttgttttcaaaatataccaactctaaaataccttatttccttttgtttctgatatttcttataactgtctaccattatgacttaatgattggcttgacattctacgttttgtcattgtcctggctatcctgggaagagggtagacaaaaagagtctgtcaaaaagaagtaacctcagcactactattctctcttaaaagataagctatttaaccccaaacatttggattggtgaatgggactattcattgttcaaagatccagtgcagtttttctcttgaaggatcatttaaaaagggacgcgaataagtttgctccttcatataagtaattattctatataggaccattatgtttggatcattaaatacctatatgaatatgagatctgaagcacgtcaagttgaaattaggtacagctgttgctccttagcaggctatgaagttgcaatgcttcacatctcttcactacttaaagtgctatttcttgcattcatttctcttgcaataaagcttcatttttttttccccttgagagtatatattttcccctacggttttaaaaaacagataaaacatggacaatggcagaggacttttttggtcttttagtattgaacatgaaatttgtatttaacactgtatcatttatcaggattcattgatcaaatatttcaacctttcatatttttaagaaaacacccatatatattgaaatgcaaacttaaacatattctgttcacttgagtgtaatacttgatgnnnnnnnnnnnnnnnnnnnnnnncttctttatagctacaaagtcagggcgttcataggcaaaatctgacaagactgaaacaattgggagattatctttcaattctgaaaaattctgtgggtggcctgtctttaagcaatgcttttctcttgtgagggaagactgtaacacagctgaactatttcagtgtcaactattcagaattgaaaatgtaaattaaaatttccacaagcattgcttcagaatgaatttgtacctataagcataaggcattaaatgacaataaaaattccaaatggactatttgttccacattgtatttttgtcttcaaatattttctaagagaatgaattatcccccccggaa

SEQ ID NO: 164 - DNA, 1235 bp, Homo sapiens
  misc_feature: Incyte ID No: 012178.2
aaatcttttctaccgaccttgtgccaggagatgtcatggtcattccattaaatgggacaataatgccttgtgatgctgtgcttattaatggtacctgcattgtaaacgaaagcatgttaacaggagaaagtgttccagtgacaaagactaatttgccaaatccttcagtggatgtgaaaggaataggagatgaattatataatccagaaacacataaacgacatactttgttttgtgggacaactgttattcagactcgtttctacactggagaactcgtcaaagccatagttgttagaacaggatttagtacttccaaaggacagcttgttcgttccatattgtatcccaaaccaactgattttaaactctacagagatgcctacttgtttctactatgtcttgtggcagttgctggcattgggtttatctacactattattaatagcattttaaatgaggtacaagttggggtcataattatcgagtctcttgatattatcacaattactgtgccccctgcacttcctgctgcaatgactgctggtattgtgtatgctcagagaagactgaaaaaaatcggtattttctgtatcagtcctcaaagaataaatatttgtggacagctcaatcttgtttgctttgacaagactggaactctaactgaagatggtttagatctttgggggattcaacgagtggaaaatgcacgatttctttcaccagaagaaaatgtgtgcaatgagatgttggtaaaatcccagtttgttgcttgtatggctacttgtcattcacttacaaaaattgaaggagtgctctctggtgatccacttgatctgaaaatgtttgaggctattggatggattctggaagaagcaactgaagaagaaacagcacttcataatcgaattatgcccacagtggttcgtcctcccaaacaactgcttcctgaatctacccctgcaggaaaccaagaaatggagctgtttgaacttccagctacttatgagataggaattgttcgccagttcccattttcttctgctttgcaacgtatgagtgtggttgccagggtgctgggggataggaaaatggacgcctacatgaaaggagcgcccgatggccattgccggtctctgtaaacctgaaacagttcctgtcgattttcaaaacgttttggaagacttcactaaacagggcttccgtgtgattgctcttgcacacaacatacgagc

SEQ ID NO: 165 - DNA, 1446 bp, Homo sapiens
  misc_feature: Incyte ID No: 100653.3
  unsure 207, 614: a, t, c, g, or other
ggagctggtgctgataacagcggaatcccccgtctacctctctccttggtcctggaacagcgctactgatcaccaagtagccacaaaatataataaaccctcagcacttgctcagtagttttgtgaaagtctcaagtaaaagagacacaaacaaaaaatcctttttcgtgaagaactccaaaaataaaattctctagagataaaaanaaaaaaaaaaaaaggaaaatgccagctgatataatggagaaaaattcctcgtccccggtggctgctaccccagccagtgtcaacacgacaccggataaaccaaagacagcatctgagcacagaaagtcatcaaagcctattatggagaaaagacgaagagcaagaataaatgaaagtctgagccagctgaaaacactgattttggatgctctgaagaaagatagctcgcggcattccaagctggagaaggcggacattctggaaatgacagtgaagcacctccggaacctgcagcgggcgcagatgacggctgcgctgagcacagacccaagtgtgctggggaagtaccgagccggcttcagcgagtgcatgaacgaggtgacccgcttcctgtccacgtgcgaggncgttaataccgaggtgcgcactcggctgctcggccacctggccaactgcatgacccagatcaatgccatgacctaccccgggcagccgcaccccgccttgcaggcgccgccaccgcccccaccgggacccggcggcccccagcacgcgccgttcgcgccgccgccgccactcgtgcccatccccgggggcgcggcgccccctcccggcggcgccccctgcaagctgggcagccaggctggagaggcggctaaggtgtttggaggcttccaggtggtaccggctcccgatggccagtttgctttcctcattcccaacggggccttcgcgcacagcggccctgtcatccccgtctacaccagcaacagcggcacctccgtgggccccaacgcagtgtcaccttccagcggcccctcgcttacggcggactccatgtggaggccgtggcggaactgagggggctcaggccacccctcctcctaaactccccaacccacctctcttccctccggactctaaacaggaacttgaatactgggagagaagaggacttttttgattaagtggttactttgtgtttttttaatttctaagaagttactttttgtagagagagctgtattaagtgactgaccatgcactatatttgtatatattttatatgttcatattggattgcgcctttgtattataaaagctcagatgacatttcgttttttacacgagatttcttttttatgtgatgccaaagatgtttgaaaatgctcttaaaatatcttcctttggggaagtttatttgagaaaatataataaaagaaaaaagtaaaggctttt

SEQ ID NO: 166 - DNA, 1060 bp, Homo sapiens
  misc_feature: Incyte ID No: 978478.4
  unsure 737-790: a, t, c, g, or other
aattaagtttatcagtgcagatgtacatggaatttggtcaaggttattttgtgatttcggtgatgaatttgaagttttagatacaacaggagaagaaccaaaagaaattttcatttcaaacataacgcaagcaaatcctggcattgttacttgccttgaaaatcatcctcacaaactggagacaggacaattcctaacatttcgagaaattaatggaatgacaggtttaaatggatctatacaacaaataacggtgatatcgccattttcttttagtattggtgacaccacagaactggaaccatatttacatggaggcatagctgtccaagttaagactcctaaaacagttttttttgaatcactggagaggcagttaaaacatccaaagtgccttattgtggattttagcaaccctgaggcacctttagagattcacacagctatgcttgccttggaccagtttcaggagaaatacagtcgcaagccaaatgttggatgccaacaagattcagaagaactgttgaaactagcaacatctataagtgaaccttggaagagaaggtgactattgaaatttatggctgtccgaatatttgtttgttaatacataagtgttctgtatattagtattctcttatccttcacatccagctttgctactctgtggcattagacaacttttttcagtttgttctgttataatttataaatctataaaatagagttaacctacnnnnnnnnnnnnnnnnnnnnnnnnnnnnnnnnnnnnnnnnnnnnnnnnnnnnnnatgccatgtgacatatagtaattaatatttgctgctatttttttaactgttactattattctttattattctgttatgatttacttgatttgttaacccacttaaacttatatatgttagctttcttatataagtcacctgttttatatattatacattcatatctctttatcacatttcgtacatcagatttagatttaaacatttcacctagaaaatggtttttttgtgtgtgttatgatgccagtgcctgcttgtcaacagttttat

SEQ ID NO: 167 - DNA, 535 bp, Homo sapiens
  misc_feature: Incyte ID No: 085942.2
gatcttttaaaacaacatccatcatatatctacaaaattgggatttttttatcgtaaaatttcatctaaaacaaaaaattcacatctgttcttggtatccattaggtgtagtggacacctctagatattcttgatgccagcatcctgtagacccgccatctcctttcccaggccatggggtgtttctgttttctattagacactgtctcttagttatataaacgtggctgctctcagaagttctccacacctttgtttcctggaagaggaaatggcatttcctggaggggatgacacgtgggcggtgaggttccactcactacgttaaacacaccctaactttcagctgtgtacttcttttcctctttcaggttctgccctgatgtttcctggaataatgctgaggactgcctttcgggtagccgccctattcagttcacttcatctcggaaatacctgacccctgccttggatccagcggccctcctgagagctgaggaaggaggaaatcctaatgtgtctgctcccggagctg

SEQ ID NO: 168 - DNA, 1264 bp, Homo sapiens
  misc_feature: Incyte ID No: 085942.3
gcgaactggagcgggaggcggcggccggagggcccaggacagccccgggagggcggcgaggcggagcaggagcgccccggctccggccacattctcagagtcaggaaaaggggcgagaggccacatgtctccctctcgcccaactgaaaacgaaacggcgctccagcagattgggtggaaagagctgggtctcttttctctgtttttcacgctagaaagggcttgtaaacattgttccttttaaaatgacctaccccaggcatttgtttgggcacacttctgtcctggggtcatcgttcctaggtggcttcggacctgggacttttcctgtatctgcacattgtcgttttatacacaattgccaaggtgggactgctttcaactttactgtgcttgaagctgcaaaggttctgccctgatgtttcctggaataatgctgaggactgcctttcgggtagccgccctattcagttcacttcatctcggaaatacctgacccctgccttggatccagcggccctcctgagagctgaggaaggaggaaatcctatgtgtctgctcccggagctgccacaacccatcttcccacaactcggaacttggaaaaaggaacccaggacacgactttgcttttcttttggacctagttggtgattatactctgtctcccatggagaccacgtcttgcatccttccttctatatgggatttaggatagaaattaaaaagaaaacatattattttgagtcttgatttggagaaaggtagtattcaggaggaagtaggctatgatacacatagaaaatttgaggacagtgttacttaacaaggacatttctgtctctgcagaagtcacagcttggaggaaaccagtttgcactatttgatgaggaatttggccaccaaaccactgatactttcccaaaggtttggcagaaattgttttttgagtggctcaccagagtacccagaagaatcagtatggaattagaggacagtggcctaccctaaataaagacatgagtgatgtataaagtctagtgtcaatttattcagaaaatatcaaaattattctgggagctatgggtcaaagttgataggcacaaacaaacaaaaacgaaaggtattttaaattcacagcttggataagtaaaagggagatgttgtcatttctcttcttcaatccaactttagattttcaagccggaaaaagggtaattagaagttagaaattgttattgccagaaaatagctctaaaccctg

SEQ ID NO: 169 - DNA, 4506 bp, Homo sapiens
  misc_feature: Incyte ID No: 977470.16c
ccttttttttttttttcagtttgacttttcaacattttattcttatatttgtacagctatattttacaacgcggtaatgcagtttagacacagccaaaccctgtctccggagtagttataacacaagcatgacgcagaatgggatgagacaaacattcccaaagagagtttagttagtaacaacttcaagtccctgtgtctgcctacacttcaaaaagggatggtgcacgctcgcccatcattgaaaacttccgtgaaaaaaggcaccgtgaggacacgttgtacgggtatatacaaactgaaaactagaacaaaattacacatttttccttctgcagatttttttgttctttttgttttttttaatacacactttgtaaattgtaaaccttcacttgcaaaaaaatacaaatacactgaggcattttagacaaaatattttcttacttatacagatgcaatacttaaaatattctcttaagtgctctttctcaataaagattctcagatccgtgtctgcctgcagatacaaaatcgagcctttaacgcagttttatatttttaatatatcttttttaggtttatatatagagaagctatatatatataatatcttatatatctacaactctgccatatattccttcacctttggttaaaaaaattaaagccctctctttgacaacatactgaagtcttgtcttttaaaagaatgcacatttacatacaaaagaaacatctgttcccacaaaacatatacattcctcattttgcagactaaagtcaagtcagaacttttgcatactcccctgctttgacatataaaatgattttgctttttgctgacatggttcaccttacacataggagaagaagcaatatgattttcttaatgttttatggcagtgggggagggggagctgctgcggctcccagtcccccaggccccgacccccaccacccccaacccccagctatgatttgcactagtggatgaaagaggcactacatcatgggatgaacattgtaaagtgttacagtatcctttgggtagattctgagaaggggctggagacgaaagcatcaacactccatgcttcagcaggctttggggagctccggaggcaggtcagtggctgacacgcggtattgcaccttggtgttggtgatggcgccatgcttctggcgcaagtgaagtcgcagctggcttttgtgacggaaatgcaggttacacttctcacaatggtaaggtttctctcctgtgtggattcgcaggtggctcttcagagtctgaaggtgccggaaacgggtgccacagatttcacagggatagggcttctcaccagtgtggataagcacatgggcacggaggtgggccacctgtacaaatctggctccgcaggtttcgcatttgtagggcttctctccagagtgaattcgagtgtgggttttcaggttggctggccggttgaactgggccccacagatgttgcaacgatagggtttctcaccggtatggacggtcttgtggctggcgaggttgcccttgtagcggaaggaggcctggcagcggtcacacttgtagggtttgtcactgtgggtctgcagcgtgtgcctcttgagtgaggcctcctcagagaagcggcagtcacactcattgcagaagaaggccccgttctcacagctagaatctgagtactcagactgggtctctcccatctcctcagggaacgtggggccagcggtgtggaggcacatctctgcatgctgtggggactgagagccgcaggacgtgcacttcggggggtgcatgtagagtggtgagtggctctcgctgctgctgcggggagagcccgtcatggacctgttaacgatgttattgagccggctggcttgtgggatggtggagtcctccccgctggcactcagcttggttggggactggaggtcaaggttctcaggctccatgggtggctggcaggcaggtggggccgtgtaggctcgtggggaaaggcggcccagctcagcctgctcaggcccctctggtttggcattctgattgaggctgttgagcacgatgaacttgtatttcttccagttgcaggctttggggtcagtggggctcttggctggaggggagccagaagcctggaggatgcaggcattcttactgctgcaggactctgtgggcgagttgggctggcagtcagatttctgggggctctgtggactaaccagacccttccggttcaggggtgcattggggggctcgaaatgcagggcaatctcatcttccgaggagggtctctcttcttctttgctggccttgtcacaagggaagtagggggcatttcgggctgagggggcagcaggtttgaggccctcagccacactgtagtgcatatcacttcgtgcctcttctgggattgtttccttgggtgaatagatattgctgtggcacacattgggggacacctccaaagtcggccggctgtactcaccagggactggcctggcactatcacatgggagtgcccgctccttggggaaggggttggccacaggcatccggacatcccgaaactcctcatcggagaagaggaggctgctgacagggaggtggctgtacatggaataagaggctggcggtgtggacaggccactgtacaggctgggggcaaaggctctgctctcacacccaggggcgctcctcagtggcaggttgttctccaccacctcacgaccccgataggccatgatgtcttggggcatcagcatccggctgttgaggaactcttcacgaggaggcttgatggcagaaaccatctctgcttcactggccttaataaacttccggcaagtgtccacaacatgctccatctgcaggtacatagccgtggccatcacagccatgatgttgccctcccgcaaattgagccgagatgtgtacatgaagtccaggaggatgcagaatccctcagggttgatctcaggatctagattgatcacactaaggttgcatttcaactggtctgtaaagatgctatagaacaggccactgcaggccatgaggaccgttttatgggctctaaactgctcacggctcacaacaatgacaacatcagtcaagatgtctcgactccggagacgattaaggttgagaagaacatcactggcatggcgggtgaactggatacagctgtcagccggcgaggccattttgtcttcaccaatgccttgcttcacagtccaaaattttgctcaaaaccaaatgagcactctaaaatgagaggtttccttgagtctgtaaccaaacactctgacatttctctgtggtcccaagtgccagtcactcaatcccatcggctccaaggttagtgtgtgcatgtgagtgagtggggactggagggaaggaagtggggaagggagaagacagaaaaagacaaaagaacctatctcctcctctccccagcccaactcgagataggcaaagagagatagactaactcggtctttaccaaacttcaaggattttctcctttgcaaaagaaagctgaagacacatgggagtgggaggtttacttaaaaactttcctctcttccttcatggaagggatcctcaaacacttctggaatacctaggctgttctttaaccagcttcaaccaccagctcgcttgtggatttccagtcgcaggcttctggaaccacaggaagcccagatttgccatttcaccatgacaagtggcaatgactcactccagatgcggattgaaacaaacaaacaaattcccctgtgtccactgtcagctgggccttgggcttttcaccgtaagcctctgcctggccaaaaacaaatgtacatacacgaggcgcaggtccttctcaagttcactcctttgcaagccaactcgtcttaagaaccagccccccccaactcctgagtgtgtgggttgagtgtgggcaatgttgtcaccacccccaccccaaatgccgcaggtgtggaagcaccaccagcatttggtttgtatttttacagagctcttagtcctttcccaccccctcacgattgcatcttatccttataacagccctgctttattagggagggaactgaggctccgggtgagaggccttgcccaaaatctcaaaaccaatttccagcaagttctggacacgccgcgtctcctagattcagccattccaccaatgccacacacaagactacccacaaaaacaatctccaaggagcagggctgtcaatgagaaactgacaactgctggctgcccccagacctggacttcccatcccaatctccccgcacccacgctgggtcagtaaccaccatgggagagttaaatgtgttctcttcccttcctccctttagctcttttggcgctttccttgtgcatagccaactaggctccttgagaagacagatcctttaaaagagctttccattgaagaagaaaacaggaaccaaaaaaaaaaaaaggcaaagagaga

SEQ ID NO: 170 - DNA, 5348 bp, Homo sapiens
  misc_feature: Incyte ID No: 283762.2
  unsure 5342, 5344: a, t, c, g, or other
ggctggcggcggtagctgtcgcccgcttggttgcgtgaccgcggggtccgcgtccgctccctccacccttcgcccttcgcccttcgcctcgtcccggcctccgcggcccagcaacggccgtcatggtgccgtcggcgctccctgcgcggccccgctgagcctcggtgcggcggcgagcgcggtcgagatcgccatgcctacccgagtatgctgctgctgttccgctttgcgtcctcgctacaaacgcctggtggacaacatattccctgaagatccaaaagatggccttgtgaaaactgatatggagaaattgacattttatgcagtatctgctccagagaaactggatcgaattggttcttacctggcagaaaggttgagcagggatgctgtcagacatcgttctgggtatgttttgattgctatggaggcactggaccaacttctcatggcttgccattctcaaagcattaagccatttgtagaaagctttcttcatatggtggcaaagctgctggaatcgggggaaccaaagcttcaagttcttggaacaaattcttttgtcaaatttgcaaatattgaagaagacacaccatcctatcacagacgttatgacttttttgtgtctcgattcagtgccatgtgccattcctgtcatagtgatccagaaatacgaacagagatacgaattgctggaattagaggtattcaaggtgtggttcgcaaaacagtcaacgatgaacttcgggccaccatttgggaacctcagcatatggataagattgttccatccctcctgtttaacatgcaaaagatagaagaagttgacagtcgcataggccctccttcttctccttctgcaactgacaaagaagagaatcctgctgtgctggctgaaaactgtttcagagaactgctgggtcgagcaacttttgggaatatgaataatgctgttagaccagtttttgcgcatttagatcatcacaaactgtgggatcccaatgaatttgcagttcactgctttaaaattataatgtattccattcaggctcagtattctcaccatgtgatccaggagattctaggacaccttgatgctcgtaaaaaagatgctccccgggttcgagcaggtattattcaggttctgttagaggctgttgccattgctgctaaaggttccataggtccgacagtgctggaagtcttcaatacccttttgaaacatctgcgtctcagcgttgaattcgaagcaaatgatttacaggggggatctgtaggcagtgtcaacttaaatacaagttccaaagacaatgatgagaagattgtgcagaatgctatcatccaaacaataggattttttggaagtaacctaccagattatcagaggtcagaaatcatgatgttcattatggggaaagtacctgtctttggaacatctacccatactttggatatcagtcaactaggggatttgggaaccaggagaattcagataatgttgctgagatctttgcttatggtgacctctggatataaagcgaagacgattgttactgcactgccagggtctttcctggatcctttgttatcaccatctctcatggaggactacgaactgagacagttggtcttggaagtaatgcataatctcatggatcgtcatgacaatagggcaaagcttcgagggatcagaataataccggatgtagctgacctaaagataaaaagagaaaaaatttgcagacaagacacaagtttcatgaaaaagaatgggcaacagctgtatcggcacatatatttgggttgtaaagaggaagacaacgttcagaaaaactatgaactactttatacttctcttgctcttataactattgaactggctaatgaagaagtagttattgatctcattcgactggccattgctttacaggacagtgcaattatcaatgaggataatttgccaatgttccatcgttgtggaatcatggcactggttgcagcatacctcaactttgtaagtcagatgatagctgtccctgcattttgccagcatgttagcaaggttattgaaattcgaactatggaagccccttattttctaccagagcatatcttcagagataagtgcatgcttccaaaatctttagagaagcatgaaaaagatttgtactttctgaccaacaagattgcagagtcgctaggtggaagtggatatagtgttgagagattgtcagttccgtatgtaccacaagtaacagatgaagatcgactttctagaagaaaaagcattgtggacaccgtatccattcaggtggatattttatccaacaatgttccttctgatgatgtggttagtaacactgaagaaatcacttttgaagcattgaagaaagcaattgataccagtggaatggaagaacaggaaaaggaaaagaggcgtcttgtgatagagaaatttcagaaagcaccttttgaagaaatagcagcacagtgtgaatccaaagcaaatttgcttcatgatagacttgcccaaatattggaactcaccatacgtcctcctcccagtccatcaggaacactgaccattacttctgggcatgcccaataccaatctgtcccagtctatgagatgaagtttccagatctgtgtgtgtactgatcggcgcatgaagacctcagcatatgatttgtaaagcctaaaaattaaggccaagctgagctttcagggtttacttaatgtgtattaacatacttcttgaaaataatgatggaacatatctttaaccaaatgtttggcataccatattagaagttttggagctatatataatttcgagtactttcaaagatagatttatgccatgttaatttgctttgaggttcctgttgcctttttaagttgaacatgttttggtttcactttattccactgttaagtagtatgttttaaacttttcacaaatgtaatgttttttaaaaagtaagccttcagaggattgaaactgtataaattgtttatctcttaaacatctacacagccgcttagatgtagaatttttgttgttgttttctgcaaaggcagatacatttaaatatattcctagtcctggggctgcaaaactgttcggtggctttttgtccccatgctttagataagctgggataggcaccttgctattcagttactataataatatgtgataggcattcctcatcttcttcacaataataggacatctgttgaatagcattcctcgaatataaccctaaaaacgccatactttaaattgtctggttcttgtaatattgtgtttcctgccaagagtttgaccattctgcttgagaagtgtagagcttactcttggagtaccaaactgtgcaatatttttacatcataagatgtattagtttacaggctgtgctttgaaattatagtagtattttgctgtggctccattaattaaatgagatatatatttagtgcagaaaaaagacatttaaaacagctattagttcacctgtgaagagtctgtacattttgatttctattaagagcacatttatttacatttgtatattattttaaatcctcatagtcaaaaaattctccagatggacttttaatttgtaagatttgaactgtgacttgtatacatctgtttagaatcaattatatttgaaaagctgcctgtgttttaacagtcaagtgtgctaaagtttgtcaatttaagctgcttttgatttcagctaccaagatcacaggtgcactctacacataacactgacagacccataacattacatacatcttagtgaattctatcacatggtaaaatgaacagctttctttgtaactcataaaattctcttaggacatttttataaagtcacctgtttatagttctatcttttcagattccatttctttttacataaaacagcatacatatcaaaaactgtagcctagaatacagtttaatttttggcttttgtttttgtttaaaaaattgcagtgaagaatgggatgtttgtgtttatggctatttgggcacctttagtagaaacagacaaaagtaaggaaacgataataggacaagcatacttgaaaatttctgaatacttaaacaaaagcgcaacatcttgaaaaccagtctagtcattgaaacctatgaaatgacactgaaagatcctgggctgcttcttaaataagtagatcagcaagacttgtttcagagtgacagtggagtcgttaccgctggaggactaaagggccctgtggcagctgtcactggaactttgcctcttgatcaggaaaaatgcttcaccagtccgtaaagccaagttgtattttttttattgcccttttttccttctgtatttttaaagaaggatgttaatttttgactatatattttaaaaaaatctaagcagggggacatgcaaaaacaatcatcatccacttggatgtcattttatagattaacactgtgtgcttttgtatggaaaaaatatatataatttaatagtataaaaaataaaatatatattcatttgcacttacgtgaaacacaaactttgctctacaaaatttcgtgtttcttagtgattttaaaatgcatgtattgcatgtaaaggaaaaccattacaattaatgtttatcacacctttatcttggtctttgttgatttgggttttgttggggtttttgttactgtttttaaattacagtaggcttctatatatcctggatttctgaactggtcttgttgacaaggattcccaagaaatggatcttttcactggctgactctcccatatctgcaagagattctgcaggaactgggtgtgcacacggtgttgtagccagttcaggtactgaatatttaggatttggtgaagttcactgtattgctatatttttgtagataaataaaactcaataaattgttaatcattctctttttgctgtatagaattgcttatatcactctttctttcatgacattggttaacatttaaatgttcctcctgtacttgtgttgtctgtgaccgcttatagagttttattgttattggtgtttacctgaatacctatgcgtacacacacacatatttccttaatacttctgaactcattatcttttagaataataatactactacactttaccagcaattaacttctccctacccaaaatgtttttcttcctgtctgaaaatggaactaatttgtcttattcgtgcttatatctgtattaaatgcaataaagttagtttttgaaatgtaaaaattcactgtgcaattcatatgtcagcaataaaacatagattatttgtaaaananaaaa

SEQ ID NO: 171 - DNA, 2328 bp, Homo sapiens
  misc_feature: Incyte ID No: 331065.2
tctcagatgatctcagctgaacataaaccataaggaattagacattattttcttatgatcaatgtgttcctgcttagtacatctttgctttaaccagatttaagaaatatgcataatcttggttattgtaagtcttattctttttgttcttcctattcatgcctcttccactccactcttctgtgtcaaattgtgacttgacagcctttccttctaccgtttatctgtaggatattgggagtgtgtggcatgcatcctcatcatcaggaaactctaaaaaagaaccgagtggtgctagccaaacagctgttgttgagcgaattgttagaacatcttctggagaaggacatcatcaccttggaaatgagggagctcatccaggccaaagtgggcagtttcagccagaatgtggaactcctcaacttgctgcctaagaggggtccccaagcttttgatgccttctgtgaagcactgagggagaccaagcaaggccacctggaggatatgttgctcaccaccctttctgggcttcagcatgtactcccaccgttgagctgtgactacgacttgagtctcccttttccggtgtgtgagtcctgtcccctttacaagaagctccgcctgtcgacagatactgtggaacactccctagacaataaagatggtcctgtctgccttcaggtgaagccttgcactcctgaattttatcaaacacacttccagctggcatataggttgcagtctcggcctcgtggcctagcactggtgttgagcaatgtgcacttcactggagagaaagaactggaatttcgctctggaggggatgtggaccacagtactctagtcaccctcttcaagcttttgggctatgacgtccatgttctatgtgaccagactgcacaggaaatgcaagagaaactgcagaattttgcacagttacctgcacaccgagtcacggactcctgcatcgtggcactcctctcgcatggtgtggagggcgccatctatggtgtggatgggagactgctccagctccaagaggtttttcagctctttgacaacgccaactgcccaagcctacagaacaaaccaaaaatgttcttcatccaggcctgccgtggaggtgctattggatcccttgggcacctccttctgttcactgctgccaccgcctctcttgctctatgagactgatcgtggggttgaccaacaagatggaaagaaccacgcaggatcccctgggtgcgaggagagtgatgccggtaaagaaaagttgccgaagatgagactgcccacgcgctcagacatgatatgcggctatgcctgcctcaaagggactgccgccatgcggaacaccaaacgaggttcctggtacatcgaggctcttgctcaagtgttttctgagcgggcttgtgatatgcacgtggccgacatgctggttaaggtgaacgcacttatcaaggatcgggaaggttatgctcctggcacagaattccaccggtgcaaggagatgtctgaatactgcagcactctgtgccgccacctctacctgttcccaggacaccctcccacatgatgtcacctccccatcatccacgccaagtggaagccactggaccacaggaggtgtgatagagcctttgatcttcaggatgcacggtttctgttctgccccctcagggatgtgggaatctcccagacttgtttcctgtgcccatcatctctgcctttgagtgtgggactccaggccagctccttttctgtgaagccctttgcctgtagagccagccttggttggacctattgccaggaatgtttcagctgcagttgaagagcctgacaagtgaagttgtaaacacagtgtggttatggggagagggcatataaattccccatatttgtgttcagttccagcttttgtagatggcactttagtgattgcttttattacattagttaagatgtcttgagagaccatctcctatcttttatttcattcatatcctccgccctttttgtcctagagtgagagtttggaaggtgtccaaatttaatgtagacattatcttttggctctgaagaagcaaacatgactagagacgcaccttgctgcagtgtccagaagcggcctgtgcgttcccttcagtactgcagcgccacccagtggaaggacactcttggctcgtttgggctcaaggcaccgcagcctgtcagccaacattgccttgcatttgtaccttattgatctttgcccatggaagtctcaaagatctttcgttggttgtttctctgagctttgttactgaaatgagcctcgtggggagcatc

SEQ ID NO: 172 - DNA, 2681 bp, Homo sapiens
  misc_feature: Incyte ID No: 331065.5
  unsure 2627, 2635, 2647-2649, 2653, 2655, 2660, 2662-2663, 2666, 2671-2672,2675-2676: a, t, c, g, or other
gggagggatgtgggggaagcgacggcccccggtttgtttgggctgtgggcggtgcgcagcggagagcccgggaaaagcgggaaatggcggcgccgagcgcggggtcttggtccaccttccagcacaaggagctgatggccgctgacaggggacgcaggatattgggagtgtgtggcatgcatcctcatcatcaggaaactctaaaaaagaaccgagtggtgctagccaaacagctgttgttgagcgaattgttagaacatcttctggagaaggacatcatcaccttggaaatgagggagctcatccaggccaaagtgggcagtttcagccagaatgtggaactcctcaacttgctgcctaagaggggtccccaagcttttgatgccttctgtgaagcactgagggagaccaagcaaggccacctggaggatatgttgctcaccaccctttctgggcttcagcatgtactcccaccgttgagctgtgactacgacttgagtctcccttttccggtgtgtgagtcctgtcccctttacaagaagctccgcctgtcgacagatactgtggaacactccctagacaataaagatggtcctgtctgccttcaggtgaagccttgcactcctgaattttatcaaacacacttccagctggcatataggttgcagtctcggcctcgtggcctagcactggtgttgagcaatgtgcacttcactggagagaaagaactggaatttcgctctggaggggatgtggaccacagtactctagtcaccctcttcaagcttttgggctatgacgtccatgttctatgtgaccagactgcacaggaaatgcaagagaaactgcagaattttgcacagttacctgcacaccgagtcacggactcctgcatcgtggcactcctctcgcatggtgtggagggcgccatctatggtgtggatgggaaactgctccagctccaagaggtttttcagctctttgacaacgccaactgcccaagcctacagaacaaaccaaaaatgttcttcatccaggcctgccgtggagatgagactgatcgtggggttgaccaacaagatggaaagaaccacgcaggatcccctgggtgcgaggagagtgatgccggtaaagaaaagttgccgaagatgagactgcccacgcgctcagacatgatatgcggctatgcctgcctcaaagggactgccgccatgcggaacaccaaacgaggttcctggtacatcgaggctcttgctcaagtgttttctgagcgggcttgtgatatgcacgtggccgacatgctggttaaggtgaacgcacttatcaaggatcgggaaggttatgctcctggcacagaattccaccggtgcaaggagatgtctgaatactgcagcactctgtgccgccacctctacctgttcccaggacaccctcccacatgatgtcacctccccatcatccacgccaagtggaagccactggaccacaggaggtgtgatagagcctttgatcttcaggatgcacggtttctgttctgccccctcagggatgtgggaatctcccagacttgtttcctgtgcccatcatctctgcctttgagtgtgggactccaggccagctccttttctgtgaagccctttgcctgtagagccagccttggttggacctattgccaggaatgtttcagctgcagttgaagagcctgacaagtgaagttgtaaacacagtgtggttatggggagagggcatataaattccccatatttgtgttcagttccagcttttgtagatggcactttagtgattgcttttattacattagttaagatgtctgagagaccatctcctatcttttatttcattcatatcctccgccctttttgtcctagagtgagagtttggaaggtgtccaaatttaatgtagacattatcttttggctctgaagaagcaaacatgactagagacgcaccttgctgcagtgtccagaagcggcctgtgcgttcccttcagtactgcagcgccacccagtggaaggacactcttggctcgtttgggctcaaggcaccgcagcctgtcagccaacattgccttgcatttgtaccttattgatctttgcccatggaagtctcaaagatctttcgttggttgtttctctgagctttgttactgaaatgagcctcgtggggagcatcagagaaggccaggaagaatggtgtgtttccctagactctgtaaccacctctctgtctttttccttcctgagaaacgtccatctctctcccttactattcccactttcattcaatcaacctgcacttcatatctagatttctagaaaagcttcctagcttatctccctgcttcatatctctcccttctttaccttcatttcatcctgttggctgctgccaccaaatctgtctagaatcctgctttacaggatcatgtaaatgctcaaagatgtaatgtagttctttgttcctgctttctctttcagtattaaactctcctttgatattatgtggcttttatttcagtgccatacatgttattgttttcaacctagaaacctttatccctgcttatctgaaacttcccaacttccctgttctttaagacttttttntttttttnttttttttttgnnnaaananccccncnnttnccccnnggnnggggg

SEQ ID NO: 173 - DNA, 3307 bp, Homo sapiens
  misc_feature: Incyte ID No: 252782.4
ggcggcggccgcggctgctgaggcggaggctgaggcagtggcgatggcgccctttcctgaagaagtggacgtcttcaccgccccacactggcggatgaagcagctggtggggctctactgcgacaagctttctaaaaccaatttttccaacaacaacgatttccgtgctcttctgcagtctttgtatgctactttcaaggagttcaaaatgcatgagcagattgaaaatgaatacattattggtttgcttcaacaacgcagccagaccatttataatgtacattctgacaataaactctccgagatgcttagcctctttgaaaagggactgaagaatgttaagaatgaatatgaacagttaaattatgcaaaacaactgaaagagagattggaggcttttacaagagattttcttcctcacatgaaagaggaagaggaggtttttcagcccatgttaatggaatattttacctatgaagagcttaaggatattaaaaagaaagtgattgcacaacactgctctcagaaggatactgcagaactccttagaggtcttagcctatggaatcatgctgaagagcgacagaagttttttaaatattccgtggatgaaaagtcagataaagaagcagaagtgtcagaacactccacaggtataacccatcttcctcctgaggtaatgctgtcaattttcagctatcttaatcctcaagagttatgtcgatgcagtcaagtaagcatgaaatggtctcagctgacaaaaacgggatcgctttggaaacatctttaccctgttcattgggccagaggtgactggtatagtggtcccgcaactgaacttgatactgaacctgatgatgaatgggtgaaaaataggaaagatgaaagtcgtgcttttcatgagtgggatgaagatgctgacattgatgaatctgaagagtctgcggaggaatcaattgctatcagcattgcacaaatggaaaaacgtttactccatggcttaattcataacgttctaccatatgttggtacttctgtaaaaaccttagtattagcatacagctctgcagtttccagcaaaatggttaggcagattttagagctttgtcctaacctggagcatctggatcttacccagactgacatttcagattctgcatttgacagttggtcttggcttggttgctgccagagtcttcggcatcttgatctgtctggttgtgagaaaatcacagatgtggccctagagaagatttccagagctcttggaattctgacatctcatcaaagtggctttttgaaaacatctacaagcaaaattacttcaactgcgtggaaaaataaagacattaccatgcagtccaccaagcagtatgcctgtttgcacgatttaactaacaagggcattggagaagaaatagataatgaacacccctggactaagcctgtttcttctgagaatttcacttctccttatgtgtggatgttagatgctgaagatttggctgatattgaagatactgtggaatggagacatagaaatgttgaaagtctttgtgtaatggaaacagcatccaactttagttgttccacctctggttgttttagtaaggacattgttggactaaggactagtgtctgttggcagcagcattgtgcttctccagcctttgcgtattgtggtcactcattttgttgtacaggaacagctttaagaactatgtcatcactcccagaatcttctgcaatgtgtagaaaagcagcaaggactagattgcctaggggaaaagacttaatttactttgggagtgaaaaatctgatcaagagactggacgtgtacttctgtttctcagtttatctggatgttatcagatcacagaccatggtctcagggttttgactctgggaggagggctgccttatttggagcaccttaatctctctggttgtcttactataactggtgcaggcctgcaggatttggtttcagcatgtccttctctgaatgatgaatacttttactactgtgacaacattaacggtcctcatgctgataccgccagtggatgccagaatttgcagtgtggttttcgagcctgctgccgctctggcgaatgacccttgacttctgatctttgtctacttcatttagctgagcaggctttctttcatgcactttactcatagcacatttcttgtgttaaccatccctttttgagcgtgacttgttttggccccatttcttacaacttcagaaatcttaatttaccagtgaattgtaatgttgtttctcttgcaaattatacttttggtttagaaagggattaggtcttttcaaaagggtgagaacagtcttacatttttcttttaaatgaaatgctttaaagaatgttggtaatgccatgtcatttaaagtatttcatagataattttgagttttaaagtccatggaggtgattggttctctttacacattaacactgtaccaagctttgcagatcttttccgacacacatgtctgaagacttattttcaaagacagcacatttttggaaactaatctcttttccgtaatatttcctttatttcaatgattctcagaaggccaattcaaacaaacccacatttaaggttctttaggattatagaataaattggcttctgagtgttagctcagtgagctaggaaagcaccaatcgatatttgtttcctttagggatactttgttctcaccactgtccctatgtcatcaaatttgggagagattttttaaaataccacaatcatttgaagaaatgtataaataaaatctactttgaggactttaccaagtaatactgttgtgttgtgatttttattataaatctcaatccaggtttactttagtatagaataggactacatactttgtctttggacctcccatgaacttattaccctgacaaatagttttagacagatactgaattttattgagctgaattttctttttgaaatgagttattcagtagtcaaaatttgaatccgtaagtatatctactttgctttgttaaaacatcatgagagtggaggcctgccacccagaaaggcacatactagtgccttttagtacaattttatgtcatgtagaagaaaatggcaatgttcctcctattgatacagatacaggcatatgtcatcttattgcgttttgctttattgcactttgcaaataatgcattttttacaaatggaaggtttatggcaactctgcgttgagccagtctattggtgccatgtttccaataaaactctccttcaaaaaaa

SEQ ID NO: 174 - DNA, 1317 bp, Homo sapiens
  misc_feature: Incyte ID No: 229068.1
gcatcagtgccttctttgccatctccctgatatcctggtggctgccagaatccgcccggtggctgattattaagggcaaaccagaccaagcacttcaggagctcagaaaggtggccaggataaatggccacaaggaggccaagaacctgaccatagaggtgctgatgtccagcgtgaaggaggaggtggcctctgcaaaggagccgcggtcggtgctggacctgttctgcgtgcccgtgctccgctggaggagctgcgccatgctggtggtgaatttctctctattgatctcctactatgggctggtcttcgacctgcagagcctgggccgtgacatcttcctcctccaggccctcttcggggccgtggacttcctgggccgggccaccactgccctcttgctcagtttccttggccgccgcaccatccaggcgggttcccaggccatggccggcctcgccattctagccaacatgctggtgccgcaagatttgcagaccctgcgtgtggtctttgctgtgctgggaaagggatgttttgggataagcctaacctgcctcaccatctacaaggctgaactctttccaacgccagtgcggatgacagcagatggcattctgcatacagtgggccggctgggggctatgatgggtcccctgatcctgatgagccgccaagccctgcccctgctgcctcctctcctctatggcgttatctccattgcttccagcctggttgtgctgttcttcctcccggagacccagggacttccgctccctgacactatccaggacctggagagccagaaatcaacagcagcccagggcaaccggcaagaggccgtcactgtggaaagtacctcgctctagaaattgtgcctgcatggagcccctttagtcaaagactcctggaaaggagttgcctcttctccaatcagagcgtggaggcgagttgggcgacttcaagggcctggcatggcagaggccaggcagccgtggccgagtggacagcgtggccgtctgctgtggctgaaggcagcttccacagctcactcctcttctccctgccctgatcagattccccaccttacccgggccctacaggagcctgtgcagatggccatgcccaaccaataacgagacggttcccctccctttccctgccaggctcatgtctttacaccttcactcagccacgccaaccagagactgggttccaatctcaccccaccacatacagagccctcatctgtgaaatgagaatgatcacgtgacccaccccccagggcaggtatcagggtgaactgatcttagcacc

SEQ ID NO: 175 - DNA, 2152 bp, Homo sapiens
  misc_feature: Incyte ID No: 407450.7
ccgtactggaggctagctcttgtcgcggccgcggcgagttaacatcgtttttccaatctgtccgcggctgccgccacccaagacagagccagaatgttcaggatgctgaacagcagttttgaggatgaccccttcttctctgagtccattcttgcacaccgagaaaatatgcgacagatgataagaagtttttctgaaccctttggaagagacttgctcagtatctctgatggtagagggagagctcataatcgtagaggacataatgatggtgaagattctttgactcatacagatgtcagctctttccagacaatggaccaaatggtgtcaaatatgagaaactatatgcagaaattagaaagaaacttcggtcaactttcagtggatccaaatggacattcattttgttcttcctcagttatgacttattccaaaataggagatgaaccgccaaaggtttttcaggcctcaactcaaactcgtcgagctccaggaggaataaaggaaaccaggaaagcaatgagagattctgacagtggactagaaaaaatggctattggtcatcatatccatgaccgagctcatgtcattaaaaagtcaaagaacaagaagactggagatgaagaggtcaaccaggagttcatcaatatgaatgaaagcgatgctcatgcttttgatgaggagtggcaaagtgaggttttgaagtacaaaccaggacgacacaatctaggaaacactagaatgagaagtgttggccatgagaatactggctcccgagaacttaaaagaagggagaaacctcaacaaagtccagccattgaacatggaaggagatcaaatgttttgggggacaaactccacatcaaaggctcatctgtgaaaagcaacaaaaaataaatagccatgcatttgatttgtttagttttgattgttttaacagttagtaatggtgctgggtaataagcataagaccaatctcttgctgttaaatcagttctgtccttggcaactttcttctgatatctgaatgttcatgaaggtcctagctttatattgtccctcttttaggaataaaattttgattttcaacaatgtgagtaaattgagtctatttaatataaaactctttaaaacatactaattttttaaagcttatatgcttatttcgcttccccagttgtttttgtgttggctaaatattcttttatatttatcaagattgattgcagagcagttctatcacttataattagttataagaaattataatgttaaaaaagtctcagtttttactaacactgtactagggtgatattaataaaggtttaaataatttatctctaattttataatgtgttgtaaagccaactagcttaaaactttaaaaataataaagcaaaactacactagtactcttttatgagaaaatagttactattttgataaagggcaaggataatcaaatagttcattttcagagaaaaatattttaaattgctaatgtacatgattgttttggttataatttatttatagaatgtatcttttctatattacattcttaatattcaccagatattatattgaccattctctttaacttcttaatgtggcatatttctactctcctttcccacaaacagcttcatctgtctccaaggttaacattctgaagctggagagtccttggagaaactctgctcagcttttttgtgacatttagaaaaatgcatttggtattctccaaaccagaatgatacattgtctcaaaatctgttagacagctgatgggtgtttttgagcaacgtcttaataattcagttgtttctgttttaattataccattaaaaatcagctttagctttttaattctagaatttaagcatcagtctgttcttataaaagttaggtttgaagtttataagaatataaaatcttaactcacatttgttgtttaatatttctgtcaaggaaaaaagcccccaaaaattgctatcactctataatcctaagtatttttcttttcaattttgtaagtaaaattatatgactatgttcatacttctctaattttttatataatatttttgttaattttactagtttgtgttttatgcctttagtcattaaaataaaatgcaaatgtgtt

SEQ ID NO: 176 - DNA, 4436 bp, Homo sapiens
  misc_feature: Incyte ID No: 200163.2
  unsure 3226-3263: a, t, c, g, or other
aatttctgcaattgcaaaccataaccatgatattataactgagggactgtagctgatctctgcatcttgagaaaaaaaggtttcacagattatctccaacacccacgggatgcattcaaagttgtgggggcagccagtaccattttatataacagcataaatcacccaatgattttactttagcttccagccatatcctatgtgattttaaaatgtatgataactaccttaccctagtctacatcggtaaactctgcaaaactccagcagttacagagcctgtgctaggagctacagggtgaagagggggaagaagactcaagaaacctgtaaaactaatggaggagaggaaaccagctcatgtgctgagaagttttaaatatgctgcatttatgaatgaagagcttcgaaacttgtctttgtctggccatgtgggatttgacagcctccctgaccagctggtcaacaagtctacttctcaaggattctgtttcaacatcctttgtgttggtgagacaggcattggcaaatccacgttaatggacactttgttcaacaccaaatttgaaagtgacccagctactcacaatgaaccaggtgttcggttaaaagccagaagttatgagcttcaggaaagcaatgtacggctgaagttaaccattgttgacaccgtgggatttggagaccagataaataaagatgacagctataagccgatagtagaatatattgatgcccagttcgaggcctacctgcaagaggaattgaagattaaacgttctctcttcaactaccatgacacgaggatccatgcctgcctctactttattgcccctactggacattcactaaagtccctggatctggtcaccatgaaaaagctggacagtaaggtgaacatcattccaataattgcaaaagctgacaccattgccaagaatgaactgcacaaattcaagagtaagatcatgagtgaactggtcagcaatggggtccagatatatcagtttcccactgatgaagaaacggtggcagagattaacgcaacaatgagtgtccatctcccatttgcagtggttggcagcaccgaagaggtgaagattggcaacaagatggcaaaggccaggcagtacccctggggtgtggtgcaggttgagaatgaaaatcattgcgattttgtgaaacttcgagagatgctgatccgcgtgaacatggaggacttgcgagagcagactcacacccgccactatgaattgtaccgacgctgtaagcttgaagagatggggttcaaggacactgaccctgacagcaaacccttcagtcttcaggagacatatgaagcaaaaaggaatgaattcctgggagaactgcagaagaaagaagaagaaatgagacaaatgtttgttatgagagtgaaggagaaagaagctgaacttaaggaggcagagaaagagcttcacgagaagtttgaccttctaaagcggacacaccaagaagaaaagaagaaagtggaagacaagaagaaggagcttgaggaggaggtgaacaacttccagaagaagaaagcagcggctcagttactacagtcccaggcccagcaatctggggcccagcaaaccaagaaagacaaggataagaaaaagtaagcaggtgtcacccccctgtatcggggacctctaacaatttattcctcttgcatgtctctacttttcccatttacagactggaaactggtcctttaccagaaagataaaagcaagtattttctctacagtgcagggaagatgatgaaggtttttaaatttttttaaaaggtacacaaagattaatttataaaactttaccacaattgaccaagcaatcaggcctggaggaacctgttgtctccagtagcatcttccacaccaacactaggagtctcaaagaagacaggttgatgtctcttcagcaccctctgaagacaattctcatgactcttgatagagagcatcctaaaatcacaattgttaaaattattttcctattctgtgttgtaagacttcgtaagccagtcactgaaattctcgttcccaaaatgaaacatttggaagagctgctagtggccactagtttcctcaaaattcaatatgatgaattgttttattgtgaaatgggatccaaatgcctatccagttgacacctctgccaacctcaagccaaacctaaacccattcataaaaggttttttttaaatagggtcttaatgtcatgtgccaaagggtcagattctgctcttgagttggtcacttcctgtgatactccagtagcagctgcctgaaaccagtgggagatttaggcctcccttgacattctcctgtgatttgaagctctcctttgaatcatcataaagcctagttttatgtcaatgctatcggttttgacaggaagcacgatggtaagaataccactaacgaaaacctttgtggtgtctcaatgacaaatatgcagatgccaccctcctttgtctaatgtacggtgctttagggcagctatttaatataaagcaactcagaacttgtttcaggaagtgttgctctttcgccttacatgccaaggttctagggaaaaagctgaccatatgtaaaaacattgatgctcaagcacataaagaattacattctttaaacatagagtacataggatcaagtctctgcacaataattgagatgtgttatagggaaaagtgagcacagtgctattgtccacttagtcttggtgaatgtgcagtaggctcacccctaaggaatctcatgttgcctgcagtaaaaataaaaatggactgctacaatgacatactgagagagttttaaatcatgctttacaaactgacattctgagctctgagacagcagaaaatgtatcaccagagcaagggaggaggcaaatgttctgaacaataattgaaatggttgtgattttatttggagttggcacagatccaagtgaccaaaggagttcaaggcccaaaatttagttatgctggattaattctgagagtaacaagcacatagattataatctaagaaaaccctttgtagctatgcatgtcgggagagcatctaacactaatggtgatgtttcccatgcagagactcagattacagtgactcttccagtgaagacagatgaaagccattgggcattgtacctttgttaatccaagctaaactaaccaaggatatagggnnnnnnnnnnnnnnnnnnnnnnnnnnnnnnnnnnnnnnacacatacatctataggtatgaatgagacaaaaagctgctgacttacagcttaggaaatgcaaagtcaagtttttcttttcaccctgaggcactcagtgcataaaggttcaagttttaaaactaagaatgtttccaaaagaccagcaatgttaaaagagtatttcgtgtatactagacgtgcctttaagcaataaaaattccaagagctgatcattattgtgcttccattttagaaaagtttatttagtaacaaacttcccgagtgtagggaggtttttccttgcccttttgaacatgttaggttattttcttcctatcctggggccttaccaatgtgtaatgctttcaaagtttctatgaagcctgtgtggattctatgttagcttatttagatagtctcatttagtttgaaggatattatacttaatttggttcagagtagtcgccaggttttgcacctgacaatggcacatattttttgtataactttttctaggtccttacccttttccacacgtgacatttgtacagtgaaagcaactgccagtggaggcctgaaatgtccaagaaaaaaaaaaatcacacctcttactgccagtggtagtggagtgttttggttagagggaccgcagaaagacagtggccaggctagacagagcagcactttgaaaagagctgggaagatgcctcctagcatagctggaacagatgtgggagttgccattcaggaactgactttgttataggtagaaaatgaaaaggcagatgcttacttatttacctgctatgcttccacctccaagcctaacttagtttttctaatagttttaaattctcttttttctgttctaatgacacgctccttttttaatgtaggtaaggctttatacttctccttgacctgtagtggcatgagagtgtataacatttcctaagatgacaggcaaagtagaactaaccctggcactgccattagctggaccccaccttctgccatctctggccacgaagtcactttccttgtttgcggctataccacagtggtgggactgcccaggggtaagttggtcagtggacagtgttcctcttttctgaaaactgtctgcacaattgccagcaggcattggctggttaagatgcaaacagttttaaaattcgtcattttaaaccat

SEQ ID NO: 177 - DNA, 1801 bp, Homo sapiens
  misc_feature: Incyte ID No: 200163.12c
gcgagggaggcgcgagggaggcgagccggagcccgagcactagcagcagccggagtcggcggaaagcacccgggcgcagcggaagccggtgccgcagctgcgatggccgtggccgtggggagaccgtctaatgaagagcttcgaaacttgtctttgtctggccatgtgggatttgacagcctccctgaccagctggtcaacaagtctacttctcaaggattctgtttcaacatcctttgtgttggtgagacaggcattggcaaatccacgttaatggacactttgttcaacaccaaatttgaaagtgacccagctactcacaatgaaccaggtgttcggttaaaagccagaagttatgagcttcaggaaagcaatgtacggctgaagttaaccattgttgacaccgtgggatttggagaccagataaataaagatgacagctataagccgatagtagaatatattgatgcccagttcgaggcctacctgcaagaggaattgaagattaaacgttctctcttcaactaccatgacacgaggatccatgcctgcctctactttattgcccctactggacattcactaaagtccctggatctggtcaccatgaaaaagctggacagtaaggtgaacatcattccaataattgcaaaagctgacaccattgccaagaatgaactgcacaaattcaagagtaagatcatgagtgaactggtcagcaatggggtccagatatatcagtttcccactgatgaagaaacggtggcagagattaacgcaacaatgagtgtccatctcccatttgcagtggttggcagcaccgaagaggtgaagattggcaacaagatggcaaaggccaggcagtacccctggggtgtggtgcaggttgagaatgaaaatcattgcgattttgtgaaacttcgagagatgctgatccgcgtgaacatggaggacttgcgagagcagactcacacccgccactatgaattgtaccgacgctgtaagcttgaagagatggggttcaaggacactgaccctgacagcaaacccttcagtcttcaggagacatatgaagcaaaaaggaatgaattcctgggagaactgcagaagaaagaagaagaaatgagacaaatgtttgttatgagagtgaaggagaaagaagctgaacttaaggaggcagagaaagagcttcacgagaagtttgaccttctaaagcggacacaccaagaagaaaagaagaaagtggaagacaagaagaaggagcttgaggaggaggtgaacaacttccagaagaagaaagcagcggctcagttactacagtcccaggcccagcaatctggggcccagcaaaccaagaaagacaaggataagaaaaactgaccatctgcctcttgagagagagagaagtgggcatccttcctttaaattcaggaaccactgttgttttatttgactttttctgttacttgcatcccttatataagttgttttggatttgggactatgttttgggggagaaaaactccagttagttctgttttttgtattggttattcagcttacttttggtatcaaaattatgccagttttaagctcacttgagtgaagtttaagtcacaagattctgtttaacatgctttccttgttttggaaacaaccaaaaacttcccttttttgttacgggattttgacctacaaatcctaatcatgtttaaaatgtgccggtgttgggtagatgacttttctgcctctggggttcaatttatatttaaagataccttaaaataaaaaaaaaagaaaa

SEQ ID NO: 178 - DNA, 2768 bp, Homo sapiens
  misc_feature: Incyte ID No: 1328237.4
ggatcccagtggcccggcgtgctcggctcccacaggcctgcagccagcatcgcaccgaaccttcggggggccgcggctggagcgctcggccggcgtgggagcgccaaggccgcagatgcaatcttcttaccgcgaagaagccaggggaataggtagccacatcttgtttgcagataagaaaggaagctaacgcagtatctgcaaagccaggagtctgactcagtacttttctcactcatgcatacaaagcagctaaaaatgacacagcttatttaccatgcccctgacatgcactgagcactttatgagcttgaactctgttaatcctcacgaccacctcatgagactctccagaaagagcaacagtaatggagtacatgagcactggaagtgacaataaagaagagattgatttattaattaaactttaaatgtgtctgagtaatagacttatggaaaatctttatgcaagtgaagagccagcagtttatgaacccagtctaatgaccatgtgtcaagacagtaatcaaaacgatgagcgttctaagtctctgctgcttagtggccaagaggtaccatggttgtcatcagtcagatatggaactgtggaggatttgcttgcttttgcaaaccatatatccaacactgcaaagcatttttatggacaacgaccacaggaatctggaattttattaaacatggtcatcactccccaaaatggacgttaccaaatagattccgatgttctcctgatcccctggaagctgacttacaggaatattggttctgattttattcctcggggcgcctttggaaaggtatacttggcacaagatataaagacgaagaaaagaatggcgtgtaaactgatcccagtagatcaatttaagccatctgatgtggaaatccaggcttgcttccggcacgagaacatcgcagagctgtatggcgcagtcctgtggggtgaaactgtccatctctttatggaagcaggcgagggagggtctgttctggagaaactggagagctgtggaccaatgagagaatttgaaattatttgggtgacaaagcatgttctcaagggacttgattttctacactcaaagaaagtgatccatcatgatattaaacctagcaacattgttttcatgtccacaaaagctgttttggtggattttggcctaagtgttcaaatgaccgaagatgtctattttcctaaggacctccgaggaacagagatttacatgagcccagaggtcatcctgtgcaggggccattcaaccaaagcagacatctacagcctgggggccacgctcatccacatgcagacgggcaccccaccctgggtgaagcgctaccctcgctcagcctatccctcctacctgtacataatccacaagcaagcacctccactggaagacattgcagatgactgcagtccagggatgagagagctgatagaagcttccctggagagaaaccccaatcaccgcccaagagccgcagacctactaaaacatgaggccctgaacccgcccagagaggatcagccacgctgtacgagtctggactctgccctcttggagcgcaagaggctgctgagtaggaaggagctggaacttcctgagaacattgctgattcttcgtgcacaggaagcaccgaggaatctgagatgctcaagaggcaacgctctctctacatcgacctcggcgctctggctggctacttcaatcttgttcggggaccaccaacgcttgaatatggctgaaggatgccatgtttgcctctaaattaagacagcattgatctcctggaggctggttctgctgcctctacacaggggcccgttacagtgaatggtgccattttcgaaggagcagtgtgacctcctgtgacccatgaatgtgcctccaagcggccctgtgtgtttgacatgtgaagctatttgatatgcaccaggtctcaaggttctcatttctcaggtgacgtgattctaaggcaggaatttgagagttcacagaaggatcgtgtctgctgactgtttcattcactgtgcactttgctcaaaattttaaaaataccaatcacaaggataatagagtagcctaaaattactattcttggttcttatttaagtatggaatattcattttactcagaatagctgttttgtgtatattggtgtatattatataactctttgagcctttattggtaaattctggtatacattgaattcattataatttgggtgactagaacaacttgaagattgtagcaataagctggactagtgtcctaaaaatggctaactgatgaattagaagccatctgacagcaggccactagtgacagtttcttttgtgttcctatggaaacattttatactgtacatgctatgctgaagacattcaaaacgtgatgttttgaatgtggataaaactgtgtaaaccacataatttttgtacatcccaaaggatgagaatgtgacctttaagaaaaatgaaaacttttgtaaattattgatgattttgtaattcttatgactaaattttcttttaagcatttgtatattaaaatagcatactgtgtatgttttatatcaaatgccttcatgaatctttcatacatatatatatttgtaacattgtaaagtatgtgagtagtcttatgtaaagtatgtttttacattatgcaaataaaacccaatacttttgtccaatgtgggttggtccaaatcaactgaataaattcagtattttgcctt

SEQ ID NO: 179 - DNA, 2621 bp, Homo sapiens
  misc_feature: Incyte ID No: 333965.1
  unsure 2605, 2618: a, t, c, g, or other
ctgctcgttgtgtcctttgaattcagagaagcacccccccgcctggggcgtcgggagcctccgggcggcggccgcggtgcggtgtcggggagaccgggctctctgcccgcgcggcgcggcgcggctcggcccacgagcgaccaccgacatggagtgggctcgggcggccaagtagccgcttctccggagccggtgccagtgccgcccgcagcccgccttccacccccggccgcgccgccggtcaggccctagggtgaagccgggaggaaaatgaagagttttcacccggaatccgttgaaaataggactgactgcaaagccttaaagaaagaaggacctcgggaggagaaacgaaaagccgcctccgggcaagacttggcgtgctccgagccgaggggctgcttcagggacctcgccccctccctttcccgctggagaaattgccgctgatgcattatccaagtggtggttgggaggatttgcagcaacatttttggttttccctcccccttctatgcattctgtttttttcctcccttttctgtttttcttcttcccgggaagtgaattgctgatgcaaatcggactttattcattaatgatgcaaccggattcgtttcaggattacgttgcacgagttgaattttgaatgaaggagaagagtttttttttttttttaaagaagtgttgactctctagttcgttgtacttttaattattattttatttaaatatacgacttaattgtattcttttaaaaatgcattaagtatatattttatggtaatttaccctcaaaatatatgtatatgggtgaaattgaagacgcttcagttaagtgaggttactggtgtgttggatgtttaattcagcaccagcattgcatgacagttgtttgaataacaagtggtttatttttaaaaccataccttttaaaatttaggttcagataatagtaaaagtcatcataataatttaaaggaaaaccagcagaaatcgaagcaaacatgtctggagaagtgcgtttgaggcagttggagcagtttattttggacgggcccgctcagaccaatgggcagtgcttcagtgtggagacattactggatatactcatctgcctttatgatgaatgcaataattctccattgagaagagagaagaacattctcgaatacctagaatgggctaaaccatttacttctaaagtgaaacaaatgcgattacatagagaagactttgaaatattaaaggtgattggtcgaggagcttttggggaggttgctgtagtaaaactaaaaaatgcagataaagtgtttgccatgaaaatattgaataaatgggaaatgctgaaaagagctgagacagcatgttttcgtgaagaaagggatgtattagtgaatggagacaataaatggattacaaccttgcactatgctttccaggatgacaataacttatacctggttatggattattatgttggtggggatttgcttactctactcagcaaatttgaagatagattgcctgaagatatggctagattttacttggctgagatggtgatagcaattgactcagttcatcagctacattatgtacacagagacattaaacctgacaatatactgatggatatgaatggacatattcggttagcagattttggttcttgtctgaagctgatggaagatggaacggttcagtcctcagtggctgtaggaactccagattatatctctcctgaaatccttcaagccatggaagatggaaaagggagatatggacctgaatgtgactggtggtctttgggggtctgtatgtatgaaatgctttacggagaaacaccattttatgcagaatcgctggtggagacatacggaaaaatcatgaaccacaaagagaggtttcagtttccagcccaagtgactgatgtgtctgaaaatgctaaggttcttattcgaaggctcatttgtagcagagaacatcgacttggtcaaaatggaatagaagactttaagaaacacccatttttcagtggaattgattgggataatattcggaactgtgaagcaccttatattccagaagttagtagcccaacagatacatcgaattttgatgtagatgatgattgtttaaaaaattctgaaacgatgcccccaccaacacatactgcatttcctggccaccatctgccatttgttggttttacatatactagtagctgtgtactttctgatcggagctgtttaagagttacggctggtcccacctcactggatcttgatgttaatgttcagaggactctagacaacaacttagcaactgaagcttatgaaagaagaattaagcgccttgagcaagaaaaacttgaactcagtagaaaacttcaagagtcaacacagactgtccaagctctgcagtattcaactgttgatggtccactaacagcaagcaaagatttagaaataaaaaacttaaaagaagaaattgaaaaactaagaaaaacttgaactcagtagaaaacttcaagagtcaacacagactgtccaagctctgcagtattcaactgttgatggtccactaacagcaagcaaagatntagaaataaaaanact

SEQ ID NO: 180 - DNA, 2928 bp, Homo sapiens
  misc_feature: Incyte ID No: 1328236.5
  unsure 966-967, 969: a, t, c, g, or other
gtccggcagccgaggagaccccgcgcagtgctgccaacgccccggtggagaagctgaggtcatcatcagatttgaaatatttaaagtggatacaaaactatttcagcaatgcagacaattaagtgtgttgttgtgggcgatggtgctgttggtaaaacatgtctcctgatatcctacacaacaaacaaatttccatcggaatatgtaccgactgtttttgacaactatgcagtcacagttatgattggtggagaaccatatactcttggactttttgatactgcagggcaagaggattatgacagattacgaccgctgagttatccacaaacagatgtatttctagtctgtttttcagtggtctctccatcttcatttgaaaacgtgaaagaaaagtgggtgcctgagataactcaccactgtccaaagactcctttcttgcttgttgggactcaaattgatctcagagatgacccctctactattgagaaacttgccaagaacaaacagaagcctatcactccagagactgctgaaaagctggcccgtgacctgaaggctgtcaagtatgtggagtgttctgcacttacacagaaaggcctaaagaatgtatttgacgaagcaatattggctgccctggagcctccagaaccgaagaagagccgcaggtgtgtgctgctatgaacatctctccagagccctttctgcacagctggtgtcggcatcatactaaaagcaatgtttaaatcaaactaaagattaaaaattaaaattcgtttttgcaataatgacaaatgccctgcacctacccacatgcactcgtgtgagacaaggcccataggtatggccccccccttccccctcccagtactagttaattttgagtaattgtattgtcagaaaagtgattagtactattttttttgttgtttcaaaaaaaaaatttttgtgtgtgtgttttttttnntntttttttttttttgttgtttaaaagcaaggcatgcttgtggatgactctgtaacagactaattggaattgttgaagctgctccctggttccactctggagagtaatctgggacatcttagtgttttgttttgtttttttccctcctcttttttttgggggggagtgtgtgtggggtttgttttttagtcttgtttttttaattcattaaccagtggttagcccttaaggggaggaggacggattgattccacattccacttcctagatctagtttagaaaacatgttccccatctggtgctcttaggaaggagtatagtaaatgcctcatttaataacatactcctttttgaaagttgccttttctctccacccttgagtagatccagtatttgatgaaactcatgaaagtgggtggagcccatcttgcccctcctcttttctaggacgcactatatgtgactgtgactttcaaggacatttgtttgccatttgctgatttttttgggaagttaatttctaacttctttcactgataaatgaagaaaagtattgcacctttgaaatgcaccaaatgaattgagtttgtaattaaaaaaatttttttccctttcagtcattgtcttatatgcttagcatagatttgcagctcagtagtatatggtgttcctagaatgcagctgaagacctgttatgtagaggaaatacgaggggtggtgctagaagacagacatctgtggaatgattcacatcctctcaagttaggaggatggaggcctgcttcattaagaagctgggggtagggtgggggtggggagaacacttaacaacatggggaccagtcaggggaatccccttatttctgttttgcatatgaggaaccctagagcagccaggtgaggctctctagtttaataaaaatcatggaaagactcttaatgcagactcttcttaagtgttaatagggattttttcagcttattttggttgcagtttccaatttttaaaaatgttgaggtaatctttcccaccttcccaaacctaattcttgtagatgcattagtgttgaaccaatgctttctcatgtctcaattctttgtatatgcattcttttcagatgtattaaacaaacaaaaacccttaaaaagagtagatgaattgccaaacacaattcctaccaataataaatcgatcaactctatctattcaggaaagcaggaagcatttggaccacagtgcatgaaaacttcaacattctgttattagataatgaatcaaccaaatgaacaatccagagaaaagaaaattgcaataataaaaggtaaattaacagaaagataatataagcaagatagtaatagttgaccattctgaaaagcttataacatcactcatcatccagcatcctttctgaaaacaaaggatttttaaatcactttatgcacatatacaacataggaggttggcaaaataatgcactatttcttaacagccatgtctcttgtagaacttcaagttaatctacaaatgaccattgtgtcttaatttagattatgaataccacattagtcaggtatttgcactaacccttaatagtatatacagtttctatggaaaattcagtggtccaaaaatttccgtagaatttgagaggacgttggtgggctgaagatagctccttgagggtcactgatgtaggctgcaatgggggttcacaaggccctgacaccgtatttatagtctaacctttttatgaaaatctgactacagctatttaaggagtagtcttaatagctgaaaatgaagatagagaaagacaccaagaatatgacacagtttacattctagtgagggacacaacaaaatcaaatttaaaaaagagtgtaatagatgctgataaatactgtagataaagcacataagaaaatagaaataaaggctgtcaatggagaagtcatga

SEQ ID NO: 181 - DNA, 4184 bp, Homo sapiens
  misc_feature: Incyte ID No: 995534.3
gttgtcgtccgttcccaagctggtttgaaactaggggtcgggctcggccgtccgtcgttgtttgtcgccgcatccccgcttccgggttaggccgttcctgcccgccccctcctctcctcccttcggacccatagatctcaggctcggctccccgcccgccgcagcccactgttgacccggcccgtactgcggccccgtggccaccatgtccctgcacggcaaacggaaggagatctacaagtatgaagcgccctggacagtctacgcgatgaactggagtgtgcggcccgataagcgctttcgcttggcgctgggcagcttcgtggaggagtacaacaacaaggttcagcttgttggtttagatgaggagagttcagagtttatttgcagaaacacctttgaccacccataccccaccacaaagctcatgtggatccctgacacaaaaggcgtctatccagacctactggcaacaagcggtgactatctccgtgtgtggagggttggtgaaacagagaccaggctggagtgtttgctaaacaataataagaactctgatttctgtgctcccctgacctcctttgactggaatgaggtggatccttatcttttaggtacctcaagcattgatacgacatgcaccatctgggggctggagacagggcaggtgttagggcgagtgaatctcgtgtctggccacgtgaagacccagctgatcgcccatgacaaagaggtctatgatattgcatttagccgggccgggggtggcagggacatgtttgcctctgtgggtgctgatggctcggtgcggatgtttgacctccgccatctagaacacagcaccatcatttacgaagacccacagcatcacccactgcttcgcctctgctggaacaagcaggaccctaactacctggccaccatggccatggatggaatggaggtggtgattctagatgtccgggttccctgcacacctgtcgccaggttaaacaaccatcgagcatgtgtcaatggcattgcttgggccccacattcatcctgccacatctgcactgcagcggatgaccaccaggctctcatctgggacatccagcaaatgccccgagccattgaggaccctatcctggcctacacagctgaaggagagatcaacaatgtgcagtgggcatcaactcagcccgactggatcgccatctgctacaacaactgcctggagatactcagagtgtagtgttggtggcgctgtgcccacgaggcaggggcttttgtatttcctgcctctgccccacccccaaagtaagaagaaacatgtttccagtggccagtatgtctttcattgctttgcacccactgttaccagaagctgctctaggagttcctggccagtcaccccatcgccctctgtggcagactcagtgctgtgtggcgcctcctcagcccagggctgagttttaagattttctctcctttcctcttctcctttggttcctcaattaaaaaatgtgtgtatatttgtttgtcaggcgttgtgttgaggagcagttcacgcactgggctgtgtctattcctctgcccaggtgtctctgtttgctgcccaaggcagcagttcatgtctcgtccatgtccatgttcgtgttagcacttacgtgggaacaaataccaatttgtcttttctcctagtatcagtgtgtttaacaaattttaactttgtatatttgttatctatcaggctaatttttttatgaaaagaattttactctcctgcttcatttctttgtcttatagtcctccctctttgcaccttcttctcttccctcagtgcctggagctggtactgggcccctgggccccatgagcagtttgccttcttgagtcactgcctgtgtagtacatacctgaccgggagtccaaaccaccttggtgctctgaagtccactgactcatcacacctttcttagcctggctcctctcaagggcattctgggcttgtaaacagacataggaagcctctgtttaccctgaagcaccactgtccagcccattggttcccactggcagcatggtagagctgagagaaacaggctctcagggtacctgacttgaggggaatcgtttcatgaagctgaacttcaagcatatttccagtacattctttcagagtctgtttttccatccaaatataagccccaggccattccacttagtgtcttttcaatgataggcaagaatgatatctgagttgaacttcggtgcttctgttgtttgagtttactgtgcctggtggtatattgggcattctttggattgagtgttctgaggtgagagagtcttcccgaggcatcctgtctgtgcttccaaccctgaacaagaccttacatgagagatggactgatggactgcggcaatcctgggctgtcaagtggatagatagttaaaaagcattatactgtgggtaatgaaaagggaggaaaaaaaaagaaggaaaaggaattatagacccccagggtcagccagttaagagctctacccacacctgtcaacccctctctcccccagtttaggttctgagcagtattggacttgtagcctgcagttgtcttttgacttgcaggccgcaggtgtctttctgttatgtgaatgagttccatggaggggcatatgtgtgattccaccgttagatgagcccttggggcaggcagtttgggatgtgctcttgggggaaagttggctgtttccttgcgctctgctcctacccgaaggtttttaagtccctctgaattgctcatctgagattagtagagtagcaggcctgaaggatgatggttttgtcctctttggttctcacctgcttgagaagtaaaacagtaactttgttcttctgggcccttaagcttttttggttaagtcttccttttcagaagtagatgtcattatatgccaaaagtctagctctttgctttaccatacagggacctgtcccaaagaaaaaggctctttttttagccagcatatttccccttctacccttttactttgttgttctgattttaggactctggctggccatgtgcttgtggttgcctctcctgcatttgccactggatttgcactgcatcgtttggagatacaaagcgagcagttcttggtcagaaccctcctctgcttttcattgtgtttgataatggttactgggtccttctctcaagggtagcaaggccaagctgatggctgcttgtttaggaggccatcagttccttcctgtggagaagggtctgaaatggaagtcagtggtagaaggggctggtctgctgggcagggcttacatccactgagttctaagattcctttcctgatctgcacctacgcctggtctgtatggtggaatttgtcagctggaactcagaaacaacaacttgaaaaaaaaataataattagaacatatttgcataagatagctatttactctggaaaccaacaacttttgagatttcccttgccctgtggacgcccagctcctgtcatccttccttaggtcctgcagtacagtcttcccctgaatgccaccggggacccagggggactccacccccctaagcaagcacacacatactcacagttgatgagttgctggtctttgagtcccagctctcttaccctccctttactccaccagcccgacgacccatgactgaggaggggatttctacagtctcaggatttagaaagtctgtaagccatccatgctccagaaagcaccgatctgttgtagttgcaaaaacaactctgtaatttgttgaggttctcaaactgacagccagcgagactgggtgggaggccctggatctgttctccctgactgcgggaggagcagccactaggactttagcaggaagcccacatggaggctccgccaggctgtggcccagctggtgatggcccttttgctcctggcagcctgaggcacagctgcctgtattgtcctcatctgttctgactgaaggatggaggtgctgaataaattaggcctcaggcctctaccaccagagagctggagaatgggtccacgtcattcaaggacctgaattttttatgctcaggagcattggaatcctcttcttccagggaggaattagcctgcaaggttaggacttgaagagggaaggtatttaataactgggcga

SEQ ID NO: 182 - DNA, 3337 bp, Homo sapiens
  misc_feature: Incyte ID No: 1098887.1
  unsure 3334: a, t, c, g, or other
caggcccgcagaccggaagcagcccgcgccgggggcttctgggaaaaggcttgtgaacggcgtttctgcgtctgccgtggacagcgaagctgctgcggttcctgagccggaggagtgcctgtgaagaaaacggggtattgccctgaggcttatattctgcctcagttgtcttttcttgaaatattataaatcagaatgtctgcacagtcagtggaagaagattcaatacttatcatcccaactccagatgaagaggaaaaaattctgagagtgaagttggaggaggatcctgatggcgaagagggatcaagtatcccctggaaccatctcccagacccagagattttccgacagcgattcaggcagtttggataccaggattcacctgggccccgtgaggctgtgagccagctccgagaactttgccgtctgtggctcaggccagagacgcacacaaaagaacaaatcttggagctggtagtgctggagcagtttgttgccatcctacccaaagagctacagacttgggttcgagatcatcatccagagaatggagaggaggcagtgacagtgctggaggatttggagagtgaacttgatgaccctggacaaccggtttctctccgtcgacgaaaacgggaagtactagtagaagacatggtatctcaagaagaagctcagggattaccaagttctgagcttgatgctgtggagaaccagctcaagtgggcatcctgggagctccattccctaaggcactgtgatgatgatggtaggactgaaaatggagcactagctccaaagcaggagcttccttcagcattagaatcccatgaagttcctggcactctcagtatgggtgttcctcaaatttttaaatatggagaaacctgtttccccaagggcaggtttgaaagaaagagaaatccctctcgaaagaaacaacatatatgtgatgaatgtggaaaacacttcagtcagggctcagcccttattcttcatcaaagaattcacagtggggagaaaccttatggatgtgttgagtgtgggaaagcattcagccgaagttccattcttgtgcaacaccagagagtccacactggagaaaaaccttacaaatgtcttgaatgtgggaaagcctttagccagaattcggggcttattaatcatcagagaatccatactggggagaaaccttatgaatgcgttcagtgtgggaaatcgtatagtcaaagctcaaatctttttagacatcagagaagacacaatgcagaaaaacttctgaatgttgtgaaagtttaagaaattgaaaaaaaaaaaagaatcagcactcaggtctttttcttcagaaatgaagacaaaatttaaaatatgaaatgatgcagaatagttttttccctattgactgtcagaaaatccactgggaaatgtaaaaatcttcactcaccattatgatatttatcttgaaagaaatggtgtcatacctgcctagaaactgaaattttaaacttaattcaggtcttaatgcctaaattttccatgtgatgtttatagtctgtattacttctccaaataatgaactacctgattcattgtccctttcttgaaagtttcttttttaagacaaatacattatttctgcattgatcattgaaatgttctttatatggatacattcccttatatattaaaaggcaacaggaattacaaagtctgaaaaccattttaaaccatcttttaaaaatttacccttatttccttttacctaatttgaatatgcatttgagaaaataagaggataaaggatggctaagagcctcaaaatgaaccataagatctcagataagaagtgatggtgataaaacatcaaaaagtgaatggaacaccttgattggggaagatatgcaaatactttgatctaagaattgaaatgtatcaagaatttatattttgcctgcaggaaaattcaaaagctactcatcctctctataatttggagtcatcttactaatgaaaataatgttttcccatatattattaaaaagcatacagtctaaataataaacagttgtaaaataatgaaggtagaaattataacactagggaaaaatttgtagcggatggcagtgttgaaggcaaatgtaaacataagggtaatggtctgtcatggcttttagaaaaagatgatagagttcatcattattttgccttcatctttgttaaggacagaaaattccctgacaggtgggcaagtatcaggttacctattttttattcctttggtacaaaagggttgaacgtcaggctaaaaaagcagccatgcatttattattaaacattttctaccgacaaggcactgtgctaggtactgtaatcctaccataagtaggtaggtatttcttccactgtaaatcataggggtttgctgttttatgtgagttagcctcttccccttgtctgagcattcctcaggggaggtcacctgtgaggttcccagaactgtagttttttttaccagggtgttgtatttggagggggaggaggactcggctcaaaagagctagctggctctccagtgttcagaggtgagtccacgatactcttaccacaatttggaagtttgtgaatctttttaaagaactaatcaatctctaatagcattgaggttgtacctacatattaagttgaatggactgttctatttaaaaaataaacaactagacaattaactagtttattaacctatcacaattgaatttttttttaattttcagtcttaacacattttttaaaatgtattaaagtaatacattgtagtagtaggattatatactccttggctgagaattccaagtactgtggttctactgtttagtggaaaactctggaagttaaaatatagaatatgagaggaggcttttttataatgggcatcattgtgtggaaaatgacccatgtgaatacaaatatttcctagttcagagattttggttatatctggtgcttggatcaagtttaaaaatggaaggtgagattttgcatgagcctattaaaaagcatagtaataaatgcaaggccagctggtggaaaagtgaggcagaatggagcttgtttataggttttctgataacaattataaaaaatgtgctttatagattaagatttattgaagtataaatatgtagtaatgatataatgtattttaagttatacaagaaaatgtagggacttttgtttgggtctttttctctttgtggctgaggggaaacaagtcagtgtccaataaagctgtaaactcctctgctctaagataaatgatgtgattattattatnacg

SEQ ID NO: 183 - DNA, 239 bp, Homo sapiens
  misc_feature: Incyte ID No: 268733.1
atactccatgaaaagaaggatcttatctttcttttagtctactttatctgtggaattttaaacactgcctggtacatgagtagaaactaagtatttgttaagtaaataaatatatgcaaatcattctcaacattgttctgaaaagactgacttttctttctctaatttgtacaccgaatactaactctttttacaccatttggacaacacagttaacaataaatattcctgtccaatct

SEQ ID NO: 184 - DNA, 871 bp, Homo sapiens
  misc_feature: Incyte ID No: 470023.20
ctgccggcaatgagcaaggctccttcctgtcggagctccccgcgcctgccgagcctactgcctccacccgaagtctacttcctgggtgggcaggaactgggcactctgcccagggcatgcactgcctccacgcagcaaccctcagagtcctgagctgaaccaagaaggaggagggggtcgggcctccgaggaaggcctagctgctgctgctgccaggaattccaggttggaggggcggcaacctcctgccagccttcaggccactctcctgtgcctgccagaagagacagagcttgaggagagcttgaggagagcaggaaaggacaatgccgtcttctgtctcgtggggcatcctcctgctggcaggcctgtgctgcctggtccctgtctccctggctgaggatccccagggagatgctgcccagaagacagatacatcccaccatgatcaggatcacccaaccttcaacaagatcacccccaacctggctgagttcgccttcagcctataccgccagctggcacaccagtccaacagcaccaatatcttcttctccccagtgagcatcgctacagcctttgcaatgctctccctggggaccaaggctgacactcacgatgaaatcctggagggcctgaatttcaacctcacggagattccggaggctcagatccatgaaggcttccaggaactcctccgtaccctcaaccagccagacagccagctccagctgaccaccggcaatggcctgttcctcagcgagggcctgaagctagtggataagtttttggaggatgttaaaaagttgtaccactcagaagcttcactgtcacttcgggacccgaagagccagaacagatcacgatacgt

SEQ ID NO: 185 - DNA, 2135 bp, Homo sapiens
  misc_feature: Incyte ID No: 989966.8
gtgccaacatggcggcgcccaggtcctaattcgggaaacgtgcaccttgactaattcggttttctgtggctacgagagcaggcttggcgggcggaggcgccagcggatgtctcatgcaaggatcgtctctgtggctaagcctcactttccgctccgcccgggtgctctctagagcccggtttttcgagtggcagtctccagggctgccgaatacagcagcgatggagaacggcaccgggccctacggagaagaacgtccacgtgaagtccaggagacgacagtcaccgagggggctgccaaaatcgcctttcccagtgccaacgaggtcttttataacccggtgcaggaattcaatcgggacctgacgtgagcagggatgtgctgtgatcaccgagtttgctcgcattcagcttggggccaaaggaatccagatcaaggttccaggagagaaggacacgcaaaaagtggtcgtggacttgtcagagcaagaggaggaaaaggttgaactgaaagagagtgaaaacctggcctcaggagaccaacctcgcacagcggccgtgggggagatctgtgaggaaggcctgcatgtgctggaaggcctggcagcttcaggcctacgttccattcgatttgccctagaggtgcctgggctcagatctgtggttgcaaacgatgcctccacccgggctgtggatctcatacgccggaatgtccagctcaatgacgtggcccacctggtacagccgagccaagcagatgcccggatgctgatgtaccagcaccagagggtgtcggagaggtttgacgtcatcgatctggacccctatggcagcccagccaccttcctggatgcagctgtgcaggctgtgagtgaaggagggttgctgtgtgtgacctgcacagacatggcggtgttggcggggaacagcggggagacgtgctacagcaagtacggggccatggccctcaagagccgggcctgccacgagatggccctgagaatcgtcctgcacagcctggacctccgcgccaactgctaccagcgcttcgtggtgccgctgctcagcatcagcgctgacttctacgtgcgtgtttttgtccgtgtcttcaccggccaggccaaggtcaaggcctcagccagcaagcaggcgctggtgttccagtgtgtgggctgcggggccttccaccttcagcgtctcggcaaagcgtcaggagtccccagcggccgggccaagttctctgcagcctgtggtccccctgtgacccccgagtgtgaacactgtgggcaacgacaccagcttggtggccccatgtgggcagagcccatccatgacctggattttgtgggccgtgtcctggaggctgtgagcgctaaccccggccgcttccacacctcggagcggatccgaggggtcctgagcgtcatcactgaggagctcccggacgtgcctctgtactacaccctggaccagctgagcagcaccatccactgcaacacaccaagcctcctgcagttgcggtcggccctcctccacgctgacttccgggtctcactctcccacgcctgtaagaacgctgtgaagacggatgccctgcctctgccctctgggacatcatgcgttgctgggagaaggaatgtccggtgaaacgggagcgactatcagagactagcccagggttccgcattctcagtgtggagcccaggctgcaggccaacttcaccatccgggaagatgccaaccccagctcccgacagcgaggactcaagcgcttccaggctaacccggaggccaactggggtccccggcctcgtgcccggccagggggcaaggcggccgacgaagctatggaggagagacgcaggctgcttcagaacaagcggaaggagccgccggaagatgtggcccagcgggctgcccggctcaagacatttccttgcaagaggtttaaggagggcacctgtcaacgcggggaccagtgctgctactcccacagccccccgacacccagggtttctgctgatgctgcccctgactgtccagagacctccaaccagaccccccctggacctggggctgccgctgggccaggcatagactgaaccaataaagagatgtcacgtcaccttctcccg

SEQ ID NO: 186 - DNA, 3916 bp, Homo sapiens
  misc_feature: Incyte ID No: 233925.5
  unsure 3021: a, t, c, g, or other
cagataggggagcggaggtggcggcggcggcggtagcggtggccttggttgtcttccagtctcctcggctcgccctttagccggcaccgctccccttccctcccccttcctctcttccttccttccctccccttccctttttcccttccccgtcggtgagcggcgggggtggctccagcaacggctgggcccaagctgtgtagaggccttaaccaacgataacggcggcgacggcgaaacctcggagctcgcagggcggggggcaaggcccgggccttggagatggagaattctcagttgtgtaagctgttcatcggcggcctcaatgtgcagacgagtgagtcgggcctgcgcggccactttgaggcctttgggactctgacggactgcgtggtggtggtgaatccccagaccaagcgctcccgttgctttggcttcgtgacctactccaatgtggaggaggcggacgccgccatggccgcctcgccccatgccgtggacggcaacactgtggagctgaagcgggcggtgtcccgggaggattcggcgcggcccggtgcccacgccaaggttaagaagctctttgtcggaggccttaaaggagacgtggctgagggcgacctgatcgagcacttctcgcagtttggcaccgtggaaaaggccgagattattgccgacaagcagtccggcaagaagcgtggattcggcttcgtgtatttccagaatcacgacgcggcagacaaggccgcggtggtcaagttccatccgattcagggccatcgcgtggaggtgaagaaagcagtccccaaggaggatatctactccggtgggggtggaggcggctcccgatcctcccggggcggccgaggcggccgggggcgcggcggtggtcgagaccagaacggcctttccaagggcggcggcggcggttacaacagctacggtggttacggcggcggcggaggcggcggctacaatgcctacggaggcggcggcggcggttcgtcctacggtgggagcgactacggtaacggcttcggcggcttcggcagctacagccagcatcagtcctcctatgggcccatgaagagcggcggcggcggcagacggtggaggcagtagctggggcggtcgcagtaatagtggaccttacagaggcggctatggcggtgggggtggctatggaggcagctccttctaaaagaaaatttaaaatgcctgggagtggctataggggtagctctttccaacagcccaagtggggtcaactcctaagccccaccccctcacacacaccgccttccctgttttgcccttgggggagccacttctaaggctgcttacccttgggggtgttcctctatttgcctgccacctctcttgtctctccctctgaagatggactcggccccacatacacatttttgtgttacagtcattgatggactctatttttttattattacttggaccttggtcgtttttatactagcaaaatgtcttgttttaatttgtgttttttggggggacggagggagtgaacttgctgattctgtagcaaaacctgggtgggggttggggtggggggtagtttactttgttgtaaggacttgataacctggctacagcgttttctatgaaatctacttggatcccatgcctgaaatttggaagcatatgtacaaaaatcatttttacgttttatttttaataaatcattgtgtttgaccgtacatgtctaacattttttttctaggatccattccgtaccgttttttaagggatatttgtttaagactttacgtgttaattctttattcttgatgtgtacttagagaaacttaagaggtcctgtggtttttttcccctctcctgttgccctgctagttgcgtgttgaattatatcccttacaggcaaaacttttgaagtggtggatgtggctttttaaactcttaagtttctgtgcatccatctcttgtactaagcgagttgtttatcatcttgacatggttggtcatttctatgacaatttacttcaaactgtgtactgtgtagttctatatagtttgtgttaagcatgtcattcatataaactgtttaaaatttttcagatggcctagtttcatccctcttactggtttgtctgtaatgaatggttaaaaataagggttatattttaccctcaaatgcgtttttgtactttcagagcaggtttaaacgtttttttttttttttccctatatccgaactgttggcctcatggaaatccctttcccgatctttgtagcaccatctactggcagaatggcagagtagctgcgaaacaatttgtttaaaaacttgcttaagacaattgcatcagatttggaagttttgccatcaaaattctttgcagaattggaagttaacacatttgcttgtaactgagatgggcttcacaggaatgtagttgccagttcatatcacaatagccctttctatatgaggtttgaaaatgtaaactgctatgcatagcttgggcaatagccctaaattgctatgacaactaatgaaccagctacgtatactggtattttaggtgcaagttgtaaagcaaaatatctgtgtattctgcttggttaacaaatgtatatttgtagccctttcctgcaatagcattcaagttgttgtttataagagaagaacaaaagtgataataggtgaaaattgcctttctggatagaaatagagaatagcaacgtttatggatatcacaaataaagaattcaattctttacatgattgagtgagagtatgtataacctggtgggtgggttcagagtaccttttaatctagtatgcttaacttgatgttaatatttaacttaaatatttgacttacatgttgacgttgaaggctcaaagctatactaagaagctttctgaaagattgggctttaaaataaaataatattttaatattgaaccattttttaacttcttgtcactgttcaattcctaaggtctagttcttgccagtnttttttttttttttcctgattggcagggcttttaaagaagtaagaagaaaggttaagattattaggctaggttatagctgctcagtagtcattttgacaaagggtagcggatggttggtacaaatagtgttatatcctctatgacaaacggggtggatgttttttacacattgaggtaatacatagtcaaatcctttgctctcaaatagttgtacactttccatacatttctgtcttattttttaattctagtgatacacaaattacatgtgggctacttcatttggtaatttggtccagctttttggtggctgtagagtggcctctaggatacagaaaatgattctctgaaatttttcgttgtaattgttaaatactactctgcttgacttactcagttttggtgggaagatctgggtcaattggaatagtacacctttctcagggttttcagtttaataaggttgtcatattattcccaacatgggaatatagtggcttctaaagtttgcaaatgaattatgtaaaaggattttctgtgtattaggaaggcaacctgttctgttcatggtatattaacacttcattgtcatgtgtctacccttaaaattgctatttgtagtgaagaaaaaagcatagtggtatttagtcacttctgggttcctcttgtcagtttatatgcaaacattttggcatgtgggacttggggaggagggacaattggttgtatgttttgaccacttccacctatgaaaattatctgaacattattcagatttaagagttcatgggagcaggtggtacagaacctagtgttgaatataatttttgtgccatgcttgaatgtattttgacggattagcaaaataaaagtgaacctcctatttttcatctt

SEQ ID NO: 187 - DNA, 7468 bp, Homo sapiens
  misc_feature: Incyte ID No: 405145.5
  unsure 3748: a, t, c, g, or other
gccgaaggctgtgccgccaaaagtagagctctgcagaggggtttgcggcgtgcacacaaagggcgcaggggaggcgccgcctggagcggaccccaaggggcagcgcagaccccagaggccagctctttctggtccagagccaagcgccggggcggcccttgcggagggcggggaggagggagcctgtccttttggaggcggctgcgcagcgggcagtcggggcgctcgtgggaaacgctcgcgggagagtgggggaggaattgagactgggagcagagggaccaagacgagtggagcagagagtgcttggcgggcgggtgccccgaagcctgaggaattgatgcatagtcggggtgcgtggacctccaggaacgcgcccctttgcagaaagagtccgtgccccgctgccgcctgctctgggcagcggccgtcgggcagcgggtgctggccgtcttggccgggagggtgacacacgcccggcagtgatggtcgaggagcccgcccgggttcgacgcccgggtcccactcgccggcgcgcggccgcggctctgccggtcgctccccgccaggggggcggcgcagcgcggggcgagcgggaggcgacgggcggcggcgcggaggccggggccgtgagggagctggttctgagtcgccgacctcacctcacctcacctgcgcgcgttgttgcccctacggagcctcctggagtccaggatcggcggagttcgaaaacgaacttcccacgtttgctatgttgccctttggagacaaaacaagagaaatggtcaatgcatggtttgctgagagagttcacaccatccctgtgtgcaaggaaggtatcagaggccacaccgaatcttgctcttgtcccttgcagcagagtcctcgtgcagataacagtgtccctggaacaccaaccaggaaaatctctgcctctgaatttgaccggcctcttagacccattgttgtcaaggattctgagggaactgtgagcttcctctctgactcagaaaagaaggaacagatgcctctaacccctccaaggtttgatcatgatgaaggggaccagtgctcaagactcttggaattagtgaaggatatttctagtcatttggatgtcacagccttatgtcacaaaattttcttgcatatccatggactgatatctgctgaccgctattccctgttccttgtctgtgaagacagctccaatgacaagtttcttatcagccgcctctttgatgttgctgaaggttcaacactggaagaagtttcaaataactgtatccgcttagaatggaacaaaggcattgtgggacatgtggcagcgcttggtgagcccttgaacatcaaagatgcatatgaggatcctcggttcaatgcagaagttgaccaaattacaggctacaagacacaaagcattctttgtatgccaattaagaatcatagggaagaggttgttggtgtagcccaggccatcaacaagaaatcaggaaacggtgggacatttactgaaaaagatgaaaaggactttgctgcttatttggcattttgtggtattgttcttcataatgctcagctctatgagacttcactgctggagaacaagagaaatcaggtgctgcttgaccttgctagtttaatttttgaagaacaacaatcattagaagtaattttgaagaaaatagctgccactattatctctttcatgcaagtgcagaaatgcaccattttcatagtggatgaagattgctccgattctttttctagtgtgtttcacatggagtgtgaggaattagaaaaatcatctgatacattaacaagggaacatgatgcaaacaaaatcaattacatgtatgctcagtatgtcaaaaatactatggaaccacttaatatcccagatgtcagtaaggataaaagatttccctggacaactgaaaatacaggaaatgtaaaccagcagtgcattagaagtttgctttgtacacctataaaaaatggaaagaagaataaagttataggggtttgccaacttgttaataagatggaggagaatactggcaaggttaagcctttcaaccgaaatgacgaacagtttctggaagcttttgtcatcttttgtggcttggggatccagaacacgcagatgtatgaagcagtggagagagccatggccaagcaaatggtcacattggaggttctgtcgtatcatgcttcagcagcagaggaagaaacaagagagctacagtcgttagcggctgctgtggtgccatctgcccagacccttaaaattactgactttagcttcagtgactttgagctgtctgatctggaaacagcactgtgtacaattcggatgtttactgacctcaaccttgtgcagaacttccagatgaaacatgaggttctttgcagatggattttaagtgttaagaagaattatcggaagaatgttgcctatcataattggagacatgcctttaatacagctcagtgcatgtttgctgctctaaaagcaggcaaaattcagaacaagctgactgacctggagatacttgcattgctgattgctgcactaagccacgatttggatcaccgtggtgtgaataactcttacatacagcgaagtgaacatccacttgcccagctttactgccattcaatcatggaacaccatcattttgaccagtgcctgatgattcttaatagtccaggcaatcagattctcagtggcctctccattgaagaatataagaccacgttgaaaataatcaagcaagctattttagctacagacctagcactgtacattaagaggcgaggagaattttttgaacttataagaaaaaatcaattcaatttggaagatcctcatcaaaaggagttgtttttggcaatgctgatgacagcttgtgatctttctgcaattacaaaaccctggcctattcaacaacggatagcagaacttgtagcaactgaattttttgatcaaggagacagagagagaaaagaactcaacatagaacccactgatctaatgaacagggagaagaaaaacaaaatcccaagtatgcaagttgggttcatagatgccatctgcttgcaactgtatgaggccctgacccacgtgtcagaggactgtttccctttgctagatggctgcagaaagaacaggccagaaatggcaggcccttgcagaacagcaggagaagatgctgattaatggggaaagcggccaggccaagcggaactgagtggcctatttcatgcagagttgaagtttacagagatggtgtgttctgcaatatgcctagtttcttacacactgtctgtatagtgtctgtatttggtatatactttggccactgctgtatttttatttttgcacaacttttgagagtatagcatgaatgtttttagagggctattacatattttttgtatatttgttttatgctactgaactgaaaggatccacaacatccactgttagcacattgataaaagcattgtttgtgatatttcgtgtactgcaaagtgtatgcagaaatccttgcactgagggtttttctgcttggggggattatttttaaaataatttggtttttgtgttttctgaattaccattttttcaagaatgtttggaatctttcctttttcaaaagtaggttaggagcaaattatcatacattctgtgacatttaaagcctttataggatagtgaaaaatgctggctgagtggattttnagagaaataattgtatttgttaacagtgtctttttttaaaaagttaaggcactctgaaacaaatggaaagtcctatgaaactgtattgtaaagaaaacattatttaattgatatgctgttttgtgagagaacaggcaagacagaactttgtcacttcagtgcagtacatttttctgaaagctacccataaaatcactttcatctcacctacctgatgcaaagcaggtgaaaccttaggagatgatccagtcactgacttgattgagggataagtgtgatttagaaatggaatggccttggatgtctatcagtgaagaaaaatgttctgttagaagatctctctaagagttttttttccttctgagcttccttttcaaaataaaagtgacaattgtagcattgacttgaagtgagacatggttatagataagacagtacaaaatgactctttttcctgtcaattgaaatttaaagaaaagttttaattatataaatagcaaagggctattgccaatactagggtcaaaaatgaatttgagggaacagtgggtaagaaactttatgcctgaataacatttagcagtattgtgattgaaaaattgccatattttgatgtataggacaagtcaactgagatccagagaatcctggatgtgaatgctaaacactggcccttaactcacattcaatgtattttcttcccataacatttagtatagttaatattttcttagaatttgagcccatttaagtggattaatattctacatgtgtgcccctaaagacacatttactcaatattggagaagtagataatgaattaagcaactggtctaggaaaggaaaatttgtttcaaatatgcaggaatgtttggatttggggagagtagaaggagagatttgcttgatttgttaacttctacctccaacccacaaaaaagatatttgatctgagtttctatcactaatttggatagaaaatttctaagggacatggtaatccagcattctcaaggacctttcgccaaaatgtgttttccatctatgtcccgattcccctaaattttgcctaaaattcagtatgttccttaagtttttaaaattctgagtgtgtacaaatatcttgacataatgcagttttatttttatcattctggtaaaaaaacaaaaaatagaagcaaaacacattgtattgccattattttgtatttggtaaaggttaatctaggaagttaccaactgtttaatgctatatgtattgtatacttgtattttcaggatattttattttttttgccatacagataaaatttgtaaggttgcccctttgtggcactggtgtgtaaaatacacagactatcactaaaataatagttatatatacatacaggtgtatacttatgcatgcatacataaatccttagtatagaaaaattgcataaagaatagcaatctttaataaacctttttattacattgtgatttagcagttatgctaaaatatgtacttatgctttagtagtttgtttggtcccctctagtatgtgtcactgagaaattttttaaagacatggtagatcgtgtttagaggctttgtatgtgtgtcattttaataagcaagaagatatatttagattagaaatggtttggtctgcctttgaatattgtttattttactttactagttgagacattaaaggaagctgggcaatgcctattttatttctttgttggatattttagttcatacaaagcagagtacttctttagggctggttaattggttcaaataatttttaatttcctttctagtatcttctcaagttggaaaaatatacatacagtcctccttcaccttactctgtatttatattacccataactagcaagaagttcttgttctagattttttgtttgtttagttataacagagtaacataccatttaattacaatttttagccagaaaagtccccactattttactaacttgttaaaagatatctatataattgcctggccttatatttttcagtagattagaccgtgccaatcacaatcctgggtggatttgtgtaagtcacttaacctctgtgtgcctaaacaagttgtgcttttttaaaaggagttatgtttgggcaaagcctttgtcttcaagcagaatgtcacagaaggcagctactttataagccccaatgggccatggagaccactgtcagaaatgggatattagtctagagagaaggtgatctattcccacatttcttttctaatgttgagtttccatgactgaacaaagagaatatatttattcagcttcacttgcagatcactagtgaatgtgagatttagagctcattgagtatattgcttcaaggtacaaacccaggatgatgatgttgtcaccactgtctcttaattttgaataatagtttcctttaataggagtattagagataagaaagtatatgaaaatatactggaaatattggattcttggagaaaactgttcagtcacagatatattcttgcctagcagtgaagtgcctttattttcagcatagcaaataaatattagacctgttccaatttgatctacaatttttttctgtgtttttcaccagattgtactcctaaaacttaacaggccatcacaagcaattgtcttttgtttacaagattgatttaatatgagaggatacaaaatgtcatcgttatcctctcttatgaacaactgtagtcaaaataaggtggcacaatttaattgttttgtatcagaaatacactgacccaccttttattgagtcctgccacatgttaggtaccgtgctctgctgtggagacagagcagtgaccccaaggagctcacggtccctgaaggaggtgctagagaagagacttagcttctgatactgccaatttaatgtgagaacatggggtatactgcatcatttccattttcatcaataacatatgttttatgcaccttctttacctgaaacttactaagaatctaccagtaaacaaacatcctgtctttttgcaagtatgaatcacttaacctgctgatagttgaagaacactttaggagttttgtattcttgtatatagtttattttttccatgtgctagccaggtaaagattacacagttcttctggactgttaaattgtgcatggttttggaccccttctgctctactacagagagtgaagaagaaagtattaaagctcactttaccattccatatacttactaaaagcctgtgtaaacatgtcttaatgaatgttgttgaaagcaatgtaaatagttgaaaatataaatttatattacagtttaagaaaaccttatgaggcatcactagccactgttaatatctatttgtattcttataccttttcaatatatttgaacaaatatagtttctggcactatttttatactaggaaaaggagttactatgtatattatgcttagcttttaaggcattttaaataaccatgaatgttgatttcattactttcctttcctccatcacgagagtcatttcagatgactctttcatgacaaaatcactttaaaggaacacttacctccgattcctgtataaagtcatgagatggtcaaggtggttttccattgtgcaaattcttcacctgtcagtggtttcctcattttgccatgctttgtaaaaataaaaagaatgatcaagtaggtaaaa

SEQ ID NO: 188 - DNA, 11167 bp, Homo sapiens
  misc_feature: Incyte ID No: 261982.8
  unsure 9131, 9138, 10638: a, t, c, g, or other
ctcggcccaacaaaatggcggcggcagcggtgtcgctttgtttccgcggctcctgcggcggtggcagtggtagcggcctttgagctgtggggaggttccagcagcagctacagtgacgactaagactccagtgcatttctatcgtaaccgggcgcgggggagcgcagatcggcgcccagcaatcacagaagccgacaaggcgttcaagcgaaaacatgaccgctgagcccatgagtgaaagcaagttgaatacattggtgcagaagcttcagtgacttccttgcacactcatcagaagaatctgaagaaacaagttctcctccacgacttgcaatgaatcaaaacacagataaaatcagtggttctggaagtaactctgatatgatggaaaacagcaaggaagagggaactagctcttcagaaaaatccaagtcttcaggatcgtcacgatcaaagaggaaaccttcaattgtaacaaagtatgtagaatcagatgatgaaaaacctttggatgatgaaactgtaaatgaagtgcgtctaatgaaaattcagaaaatgatattactatgcagagcttgccaaaaggtacagtgattgtacagccagagccagtgctgaatgaagacaaagatgattttaaagggcctgaatttagaagcagaagtaaaatgaaaactgaaaatctcaaaaaacgcggagaagatgggcttcatgggattgtgagctgcactgcttgtggacaacaggtcaatcattttcaaaaagattccatttatagacacccttcattgcaagttcttatttgtaagaattgctttaagtattacatgagtgatgatattagccgtgactcagatggaatggatgaacaatgtaggtggtgtgcggaaggtggaaacttgatttgttgtgacttttgccataatgctttctgcaagaaatgcattctacgcaaccttggtcgaaaggagttgtccacaataatggatgaaaacaaccaatggtattgctacatttgtcacccagagcctttgttggacttggtcactgcatgtaacagcgtatttgagaatttagaacagttgttgcagcaaaataagaagaagataaaagttgacagtgaaaagagtaataaagtatatgaacatacatccagattttctccaaagaagactagttcaaattgtaatggagaagaaaagaaattagatgattcctgttctggctctgtaacctactcttattccgcactaattgtgcccaaagagatgattaagaaggcaaaaaaactgattgagaccacagccaacatgaactccagttatgttaaatttttaaagcaggcaacagataattcagaaatcagttctgctacaaaattacgtcagcttaaggcttttaagtctgtgttggctgatattaagaaggctcatcttgcattggaagaagacttaaattccgagtttcgagcgatggatgctgtaaacaaagagaaaaataccaaagagcataaagtcatagatgctaagtttgaaacaaaagcacgaaaaggagaaaaaccttgtgctttggaaaagaaggatatttcaaagtcagaagctaaactttcaagaaaacaggtagatagtgagcacatgcatcagaatgttccaacagaggaacaaagaacaaataaaagtaccggtggtgaacataagaaatctgatagaaaagaagaacctcaatatgaacctgccaacacttctgaagatttagacatggatattgtgtctgttccttcctcagttccagaagacatttttgagaatcttgagactgctatggaagttcagagttcagttgatcatcaaggggatggcagcagtggaactgaacaagaagtggagagttcatctgtaaaattaaatatttcttcaaaagacaacagaggaggtattaaatcaaaaactacagctaaagtaacaaaagaattatatgttaaactcactcctgtttccctttctaattccccaattaaaggtgctgattgtcaggaagttccacaagataaagatggctataaaagttgtggtctgaaccccaagttagagaaatgtggacttggacaggaaaacagtgataatgagcatttggttgaaaatgaagtttcattacttttagaggaatctgatcttcgaagatccccacgtgtaaagactacacccttgaggcgaccgacagaaactaaccctgtaacatctaattcagatgaagaatgtaatgaaacagttaaggagaaacaaaaactatcagttccagtgagaaaaaaggataagcgtaattcttctgacagtgctatagataatcctaagcctaataaattgccaaaatctaagcaatcagagactgtggatcaaaattcagattctgatgaaatgctagcaatcctcaaagaggtgagcaggatgagtcacagttcttcttcagatactgatattaatgaaattcatacaaaccataagactttgtatgatttaaagactcaggcggggaaagatgataaaggaaaaaggaaacgaaaaagttctacatctggctcagattttgatactaaaaagggcaaatcagctaagagctctataatttctaaaaagaaacgacaaacccagtctgagtcttctaattatgactcagaattagaaaaagagataaagagcatgagtaaaattggtgctgccagaaccaccaaaaaaagaattccaaatacaaaagattttgactcttctgaagatgagaaacacagcaaaaaaggaatggataatcaagggcacaaaaatttgaagacctcacaagaaggatcatctgatgatgctgaaagaaaacaagagagagagactttctcttcagcagaaggcacagttgataaagacacgaccatcatggaattaagagatcgacttcctaagaagcagcaagcaagtgcttccactgatggtgtcgataagctttctgggaaagagcagagttttacttctttggaagttagaaaagttgctgaaactaaagaaaagagcaagcatctcaaaaccaaaacatgtaaaaaagtacaggatggcttatctgatattgcagagaaattcctaaagaaagaccagagcgatgaaacttctgaagatgataaaaagcagagcaaaaagggaactgaagaaaaaaagaaaccttcagactttaagaaaaaagtaattaaaatggaacaacagtatgaatcttcatctgatggcactgaaaagttacctgagcgagaagaaatttgtcattttcctaagggcataaaacaaattaagaatggaacaactgatggagaaaagaaaagtaaaaaaataagagataaaacttctaaaaagaaggatgaattatctgattatgctgagaagtcaacagggaaaggagatagttgtgactcttcagaggataaaaagagtaagaatggagcatatggtagagagaagaaaaggtgcaagttgcttggaaagagttcaaggaagagacaagattgttcatcatctgatactgagaaatattccatgaaagaagatggttgtaactcttctgataagagactgaaaagaatagaattgagggaaagaagaaatttaagttcaaagagaaatactaaggaaatacaaagtggctcatcatcatctgatgctgaggaaagttctgaagataataaaaagaagaagcaaagaacttcatctaaaaagaaggcagtcattgtcaaggagaaaaagagaaactccctaagaacaagcactaaaaggaagcaagctgacattacatcctcatcttcttctgatatagaagatgatgatcagaattctataggtgagggaagcagcgatgaacagaaaattaagcctgtgactgaaaatttagtgctgtcttcacatactggattttgccaatcttcaggagatgaagccttatctaaatcagtgcctgtcacagtggatgatgatgatgacgacaatgatcctgagaatagaattgccaagaagatgcttttagaagaaattaaagccaatctttcctctgatgaggatggatcttcagatgatgagccagaagaagggaaaaaaagaactggaaaacaaaatgaagaaaacccaggagatgaggaagcaaaaaatcaagtcaattctgaatcagattcagattctgaagaatctaagaagccaagatacagacataggcttttgcggcacaaattgactgtgagtgacggagaatctggagaagaaaaaaagacaaagcctaaagagcataaagaagtcaaaggcagaaacagaagaaaggtgagcagtgaagattcagaagattctgattttcaggaatcaggagttagtgaagaagttagtgaatccgaagatgaacagcggcccagaacaaggtctgcaaagaaagcagagttggaagaaaatcagcggagctataaacagaaaaagaaaaggcgacgtattaaggttcaagaagattcatccagtgaaaacaagagtaattctgaggaagaagaggaggaaaaagaagaggaggaggaagaggaggaggaggaggaagaggaggaggaagatgaaaatgatgattccaagtctcctggaaaaggcagaaagaaaattcggaagattcttaaagatgataaactgagaacagaaacacaaaatgctcttaaggaagaggaagagagacgaaaacgtattgctgagagggagcgtgagcgagaaaaattgagagaggtgatagaaattgaagatgcttcacccaccaagtgtccaataacaaccaagttggttttagatgaagatgaagaaaccaaagaacctttagtgcaggttcatagaaatatggttatcaaattgaaaccccatcaagtagatggtgttcagtttatgtgggattgctgctgtgagtctgtgaaaaaaacaaagaaatctccaggttcaggatgcattcttgcccactgtatgggccttggtaagactttacaggtggtaagttttcttcatacagttcttttgtgtgacaaactggatttcagcacggcgttagtggtttgtcctcttaatactgctttgaattggatgaatgaatttgagaagtggcaagagggattaaaagatgatgagaagcttgaggtttctgaattagcaactgtgaaacgtcctcaggagagaagctacatgctgcagaggtggcaagaagatggtggtgttatgatcataggctatgagatgtatagaaatcttgctcaaggaaggaatgtgaagagtcggaaacttaaagaaatatttaacaaagctttggttgatccaggccctgattttgttgtttgtgatgaaggccatattctaaaaaatgaagcatctgctgtttctaaagctatgaattctatacgatcaaggaggaggattattttaacaggaacaccacttcaaaataacctaattgagtatcattgtatggttaattttatcaaggaaaatttacttggatccattaaggagttcaggaatagatttataaatccaattcaaaatggtcagtgtgcagattctaccatggtagatgtcagagtgatgaaaaaacgtgctcacattctctatgagatgttagctggatgtgttcagaggaaagattatacagcattaacaaaattcttgcctccaaaacacgaatatgtgttagctgtgagaatgacttctattcagtgcaagctctatcagtactacttagatcacttaacaggtgtgggcaataatagtgaaggtggaagaggaaaggcaggtgcaaagcttttccaagattttcagatgttaagtagaatatggactcatccttggtgtttgcagctagactacattagcaaagaaaataagggttattttgatgaagacagtatggatgaatttatagcctcagattctgatgaaacctccatgagtttaagctccgatgattatacaaaaaagaagaaaaaagggaaaaaggggaaaaaagatagtagctcaagtggaagtggcagtgacaatgatgttgaagtgattaaggtctggaattcaagatctcggggaggtggtgaaggaaatgtggatgaaacaggaaacaatccttctgtttctttaaaactggaagaaagtaaagctacttcttcttctaatccaagcagcccagctccagactggtacaaagattttgttacagatgctgatgctgaggttttagagcattctgggaaaatggtacttctctttgaaattcttcgaatggcagaggaaattggggataaagtccttgttttcagccagtccctcatatctctggacttgattgaagattttcttgaattagctagtagggagaagacagaagataaagataaaccccttatttataaaggtgaggggaagtggcttcgaaacattgactattaccgtttagatggttccactactgcacagtcaaggaagaagtgggctgaagaatttaatgatgaaactaatgtgagaggacgattatttatcatttctactaaagcaggatctctaggaattaatctggtagctgctaatcgagtaattatattcgacgcttcttggaatccatcttatgacatccagagtatattcagagtttatcgctttggacaaactaagcctgtttatgtatataggttcttagctcagggaaccatggaagataagatttatgatcggcaagtaactaagcagtcactgtcttttcgagttgttgatcagcagcaggtggagcgtcattttactatgaatgagcttactgaactttatacttttgagccagacttattagatgaccctaattcagaaaagaagaagaagagggatactcccatgctgccaaaggataccatacttgcagagctccttcagatacataaagaacacattgtaggataccatgaacatgattctcttttggaccacaaagaagaagaagagttgactgaagaagaaagaaaagcagcttgggctgagtatgaagcagagaagaagggactgaccatgcgtttcaacataccaactgggaccaatttaccccctgtcagtttcaactctcaaactccttatattcctttcaatttgggagccctgtcagcaatgagtaatcaacagctggaggacctcattaatcaaggaagagaaaaagttgtagaagcaacaaacagtgtgacagcagtgaggattcaacctcttgaggatataatttcagctgtatggaaggagaacatgaatctctcagaggcccaagtacaggcgttagcattaagtagacaagccagccaggagcttgatgttaaacgaagagaagcaatctacaatgatgtattgacaaaacaacagatgttaatcagctgtgttcagcgaatacttatgaacagaaggctccagcagcagtacaatcagcagcaacagcaacaaatgacttatcaacaagcaacactgggtcacctcatgatgccaaagcccccaaatttgatcatgaatccttctaactaccagcagattgatatgagaggaatgtatcagccagtggctggtggtatgcagccaccaccattacagcgtgcaccacccccaatgagaagcaaaaatccaggaccttcccaagggaaatcaatgtgattttgcactaaaagcttaatggattgttaaaatcatagaaagatcttttatttttttaggaatcaatgacttaacagaactcaactgtataaatagtttggtccccttaaatgccaatcttccatattagttttacttttttttttttaaatagggcataccatttcttcctgacatttgtcagtgatgttgcctagaatcttcttacacacgctgagtacagaagatatttcaaattgttttcagtgaaaacaagtccttccataatagtaacaactccacagatttcctctctaaatttttatgcctgcttttagcaaccataaaattgtcataaaattaataaatttaggaaagaataaagatttatatattcattctttacatataaaaacacacagctgagttcttagagttgattcctcaagttatgaaatacttttgtacttaatccatttcttgattaaagtgattgaaatggttttaatgttcttttgactgaagtctgaaactgggctcctgctttattgtctctgtgactgaaagttagaaactgagggttatctttgacacagaattgtgtgcaatattcttaaatactactgctctaaaagttggagaagtcttgcagttatcttagcattgtataaacagccttaagtatagcctaagaagagaattcctttttcttctttagtccttctgccattttttattttcagttatatgtgctgaaataattactggtaaaatttcagggttgtggattatcttccacacatgaattttctctctcctggcacgaatataaagcacatctcttaactgcatggtgccagtgctaatgcttcatcctgttgctggcagtgggatgtggacttagaaaatcaagttctagcattttagtaggttaacactgaagttgtggttgttaggttcacaccctgttttataaacaacatcaaaatggcagaaccattgctgactttaggttcacatgaggaatgtacttttaacaattcccagtactatcagtattgtgaaataattcctctgaaagataagaatcactggcttctatgcgcttcttttctctcatcatcatgttcttttaccccagtttccttacatttttttaaattgtttcagagtttgttttttttttagtttagattgtgaggcaattattaaatcaaaattaattcatccaatacccctttactagaagttttactagaaaatgtattacattttattttttcttaatccagttctgcaaaaatgacctataaatttattcatgtacaattttggttacttgaattgttaaagaaaacattgtttttgactatgggagtcaactcaacatggcagaaccatttttgagatgatgatacaacaggtagtgaaacagcttaagaattccaaaaaaaaaanaaaaaanaaaatgtaaggaaactgggtttgggctttgctttaggtatcactggattagaatgagtttaacattagctaaaactgctttgagttgtttggatgattaagagattgccatttttatcttggaagaactagtggtaaaacatccaagagcactaggattgtgatacagaatttgtgaggtttggtggatccacgcccctctcccccactttcccatgatgaaatatcactaataaatcctgtatatttagatattatgctagccatgtaatcagatttatttaattgggtggggcaggtgtgtatttactttagaaaaaatgaaaaagacaagatttatgagaaatatttgaaggcagtacactctggccaactgttaccagttggtatttctacaagttcagaatattttaaacctgatttactagacctgggaattttcaacatggtctaattatttactcaaagacatagatgtgaaaattttaggcaaccttctaaatctttttcaccatggatgaaactataacttaaagaataatacttagaagggttaattggaaatcagagtttgaaataaaacttggaccactttgtatacactcttctcacttgacattttagctatataatatgtactttgagtataacatcaagctttaacaaatatttaaagacaaaaaaatcacgtcagtaaaatactaaaaggctcatttttatatttgttttagatgttttaaatagttgcaatggattaaaaatgatgatttaaaatgttgcttgtaatacagttttgcctgctaaattctccacattttgtaacctgttttatttctttgggtgtaaagcgtttttgcttagtattgtgatattgtatatgttttgtcccagttgtatagtaatgtttcagtccatcatccagctttggctgctgaaatcatacagctgtgaagacttgcctttgtttctgttagactgcttttcagttctgtattgagtatcttaagtactgtagaaaagatgtcacttcttcctttaaggctgttttgtaatatatataaggactggaattgtgtttttaaagaaaagcattcaagtatgacaatatactatctgtgttttcaccattcaaagtgctgtttagtagttgaaacttaaactatttaatgtcatttaataaagtgaccaaaatgtgttgtgctctttattgtattttcacagctttgaaaatctgtgcacatactgtttcatagaaaatgtatagctttagttgaactatataatggaggttcttttgcacatttagttatttaatattgagaggtcacgaagttatggttaatgaatctgatatatactaaattctgtaaagggagatctctcatctcaaaaagaatttacataccaggaagtccatgtgtgtttgtgttagttttggatgtctttgtgtaatccagccccatttcctgtttcccaacagctgtaacactcattttaagtnaagcagggctaccaacccacacttgatagaaaagctgcttaccattcagaagcttccttattacctggcctccaaatgagctgaatattttgtagccttcccttagctatgttcattttccctccattatcataaaatcagatcgatatttatgtgccccaaacaaaactttaagagcagttacattctgtcccagtagcccttgtttcctttgagagtagcatgttgtgaggctatagagacttattctaccagtaaaacaggtcaatccttttacatgtttattatactaaaaattatgttcagggtatttactactttatttcaccagactcagtctcaagtgacttggctatctccaaatcagatctacccttagagaataaacatttttctaccgttattttttttcaagtctataatctgagccagtcccaaaggagtgatcaagtttcagaaatgctttcatcttcacaacattttatatatactattatatggggtgaataaagttttaaatccgaaatat

SEQ ID NO: 189 - DNA, 2294 bp, Homo sapiens
  misc_feature: Incyte ID No: 246285.1
  unsure 1242-1534, 2281-2282: a, t, c, g, or other
cccaaaagagtacatctgatcattttagcctgcaactaatgatagagatattagggctagttaaccacagttttacaagactcctctcccgcgtgtgggccattgtcatgctgtcggtcccgcccacctgaaaggtctccccgccccgactggggtttgttgttgaagaaggagaatccccggaaaggctgagtctccagctcaaggtcaaaacgtccaaggccgaaagccctccagtttcccctggacgccttgctcctgcttctgctacgaccttctggggaaaacgaatttctcattttcttcttaaattgccattttcgctttaggagatgaatgttttcctttggctgttttggcaatgactctgaattaaagcgatgctaacgcctcttttccccctaattgttaaaagctatggactgcaggaagatggcccgcttctcttacagtgtgatttggatcatggccatttctaaagtctttgaactgggattagttgccgggctgggccatcaggaatttgctcgtccatctcggggatacctggccttcagagatgacagcatttggccccaggaggagcctgcaattcggcctcggtcttcccagcgtgtgccgcccatggggatacagcacagtaaggagctaaacagaacctgctgcctgaatgggggaacctgcatgctggggtccttttgtgcctgccctccctccttctacggacggaactgtgagcacgatgtgcgcaaagagaactgtgggtctgtgccccatgacacctggctgcccaagaagtgttccctgtgtaaatgctggcacggtcagctccgctgctttcctcaggcatttctacccggctgtgatggccttgtgatggatgagcacctcgtggcttccaggactccagaactaccaccgtctgcacgtactaccacttttatgctagttggcatctgcctttctatacaaagctactattaatcgacattgacctatttccagaaatacaattttagatatcatgcaaatttcatgaccagtaaaggctgctgctacaatgtcctaactgaaagatgatcatttggtaggtggccttaaaataatggatacatttccaaaaatggtctctaacatttccttacagaactacttcttacttctttgccctgccctctcccaaaaaactacttcttttttcaaaagaaagtcagccatatctccattgtgcctaagtccagnnnnnnnnnnnnnnnnnnnnnnnnnnnnnnnnnnnnnnnnnnnnnnnnnnnnnnnnnnnnnnnnnnnnnnnnnnnnnnnnnnnnnnnnnnnnnnnnnnnnnnnnnnnnnnnnnnnnnnnnnnnnnnnnnnnnnnnnnnnnnnnnnnnnnnnnnnnnnnnnnnnnnnnnnnnnnnnnnnnnnnnnnnnnnnnnnnnnnnnnnnnnnnnnnnnnnnnnnnnnnnnnnnnnnnnnnnnnnnnnnnnnnnnnnnnnnnnnnnnnnnnnnnnnnnnnnnnnnnnnnnnnnnnnnnnnntggtgtttcttgatacatgtaattctaccaaggtcttcttaatatgttcttttaaatgattgaattatatgttcagattattggagactaattctaatgtggaccttagaatacagttttgagtagagttgatcaaaatcaattaaaatagtctctttaaaaggaaagaaaacatctttaaggggaggaaccagagtgctgaaggaatggaagtccatctgcgtgtgtgcagggagactgggtaggaaagaggaagcaaatagaagagagaggttgaaaaacaaaatgggttacttgattggtgattaggtggtggtagagaagcaagtaaaaaggctaaatggaagggcaagtttccatcatctatagaaagctatataagacaagaactcccctttttttcccaaaggcattataaaaagaatgaagcctccttagaaaaaaaattatacctcaatgtccccaacaagattgcttaataaattgtgtttcctccaagctattcaattcttttaactgttgtagaagacaaaatgttcacaatatatttagttgtaaaccaagtgatcaaactacatattgtaaagcccatttttaaaatacattgtatatatgtgtatgcacagtaaaaatggaaactatattgacctaaaaaaaaaaaaaggaaaccacccttaggcaggcaggacatgctcttcagaactctgctcttcagagttccaaagaagggataaaacatcttttatnnccatcaaatagc

SEQ ID NO: 190 - DNA, 5648 bp, Homo sapiens
  misc_feature: Incyte ID No: 228511.1
  unsure 3542, 3564, 3567-3568, 3592, 3678, 3689: a, t, c, g, or other
gcaaaatgttcagttggtcccaagtgcaatgccaccctcaggaggagtacaaactgtgcccatttcgaacttacaaatattgccaggtccactgatctcaaatagcccagcaaccattttccaagggacttctggcaaccaggtaaccataacagttgtgccaaatacgagttttgcacctgcaactgtgagtcagggaaatgcaactcagctcattgctccagcaggaattaccatgagcggaacgcagacaggagttggacttccagtacaaacgcttccagccactcaagcatctcctgctggacaatcatcatgtactactgctactcccccattcaaaggtgataaaataatttgccaaaaggaggaggaagcaaaggaagcaacaggtttacatgttcatgaacgtaaaattgaagtcatggagaacccgtcctgccgacgaggagccacaaacaccagcaatggggatacaaaggaaaatgaaatgcatgtgggaagtcttttaaatgggagaaagtacagtgactcaagtctacctccttcaaactcagggaaaattcaaagtgagactaatcagtgctcactaatcagtaatgggccatcattggaattaggtgagaatggagcatctgggaaacagaactcagaacaaatagacatgcaagatatcaaaagtgatttgagaaaaccgctagttaatggaatctgtgattttgataaaggagatggttctcatttaagcaaaaacattccaaatcataaaacttccaatcatgtaggaaatggtgagatatctccaatggaaccacaagggactttagatatcactcagcaagatactgccaaaggtgatcaactagaaagaatttctaatggacctgtattaactttgggtggttcatctgtgagcagtatacaggaggcttcaaatgcggcaacacagcaatttagtggtactgatttgcttaatggacctctagcttcaagtttgaattcagatgtgcctcagcaacgcccaagtgtagttgtctcaccacattctacaacctctgttatacagggacatcaaatcatagcagttcccgactcaggatcaaaagtatcccattctcctgccctatcatctgacgttcggtctacaaatggcacagcagaatgcaaaactgtaaagaggccagcagaggatactgatagggaaacagtcgcaggaattccaaataaagtaggagttagaattgttacaatcagtgaccccaacaatgctggctgcagcgcaacaatggttgctgtgccagcaggagcagatccaagcactgtagctaaagtagcaatagaaagtgctgttcagcaaaagcaacagcatccaccaacatatgtacagaatgtggtcccgcagaacactcctatgccaccttcaccagctgtacaagtgcagggccagcctaacagttctcagccttctccattcagtggatccagtcagcctggagatccaatgagaaaacctggacagaacttcatgtgtctgtggcagtcttgtaaaaagtggtttcagacaccctcacaggttttctaccatgcagcaactgaacatggaggaaaagatgtatatccagggcagtgtctttgggaaggttgtgagccttttcagcgacagcggttttcttttattacccacttgcaggataagcactgttcaaaggatgccctacttgcaggattaaaacaagatgaaccaggacaagcaggaagtcagaagtcttctaccaagcagccaactgtagggggcacaagctcaactcctagagcacaaaaggccattgtgaatcatcccagtgctgcacttatggctctgaggagaggatcaagaaaccttgtctttcgagattttacagatgaaaaagagggaccaataactaaacacatccgactaacagctgccttaatattaaaaaatattggtaaatattcagaatgtggtcgcagattgttaaagagacatgaaaataacttatcagtgctagccattagtaacatggaagcttcctccacccttgccaaatgcctttatgaacttaattttacagttcagagtaaggaacaagaaaaagactcagaaatgctgcagtgaaaaataattccacttacacagtgggggactcaaagtcagccacatttcacatactgttactgaagaaagcaccaagtcttaatggaacaaagaccatagaatgaattattttatctcctcccatgatgctgagaggaagcttcgtattctgatctctgagtgaatccctttgttctctgtttaaacaaaaaggtactatgcagaaaaggcaaacagtaatagtcagcctcagtttatccttctagttgtttcccagatgcttccctctcttcctgcaatactatattaacatttacggggtgtggagctatgtattgtttctattttagtttttaaacttgcaaaattcatgataaagagtcatcgctgtgaccttggagactgacaatcttctatatgtttttttgcagattgttaaagagacatgaaaataacttatcagtgctagccattagtaacatggaagcttcctccacccttgccaaatgcctttatgaacttaattttacagttcagagtaaggaacaagaaaaagactcagaaatgctgcagtgaaaaataattccacttacacagtgggggactcaaagtcagccacatttcacatactgttactgaagaaagcaccaagtcttaatggaacaaagaccatagaatgaattattttatctcctcccatgatgctgagaggaagcttcgtattctgatctctgagtgaatccctttgttctctgtttaaaaaaatctaaaaagaaaaagggaaaaaaaaaaagaactgctgtgggattgtcaaccagcttatctgcaggatgtttcagatctgataaatcctgatggaaactggtatgatcagaattcagtaccatccacattggaatatacatggaatattgtaaaacctacatgagcagatgaaatagaagcattaaatatttttatctatatccaaaaaggagcacatttttatatttacaaaaccgtttaagctggtttgaataatttaaaaaagtttcagcacacctatacccccgatctcagagggggccaccaatatctagctatggatcgtgtgttttgtttagaaatcagtagcttggttttcttacttgagccaatatattttcacttatttattatcataaaaatttaccagtctgaatagatcttgtaaatatttgtgaatagaatgaatacctttcatgccactgcagccactggaaatacattctgtggtgtcctagaagcattattggtaggttctaaagttttctagactttcctgtcaattgtaagtaattgtgatatattctatgcagtggatgaatgttctttaaatttgtgtaaatacttctgcaaaggtactgatgctgtaaagtcaaaacagttttgtggaactgtgattttnttttcttttttctttttttttntcnntttttttttgtattatacaccttntaggaactcattttgctgggctgaaaagagtatgggaataatatatctcatgtcattttttagaagaaaaactatttgaaggtatnttttggttttncttaacatgtatccactgtaaacgtttgtcgtgtacaagctcagagcttggacagaattttttgtatttgtaaattggtttaaatacatggaattttatacaggttttctcctgtgttatatatgcattatgtgcaggtatgatattttcttcactactttttctatcttaatatagtgtggaattttattgtattattcttccattcttaatactgtaccacattcctgctcagaaactgctcacttccttaaattgtcttttttcccccagcgtgaaatgtatccatttataactgcctattgcctgttctattagcatccaaaaatgtggaaggcctcccaaccaccatttctgctgtgtccttaggatgtgcagtaaaaaatatagacctaacagtttatgttatagaatggctttatttactttggtgactgtttatagtttttaaataaaagactgaacattttcttgagtccttcatttctgagtatgcttaagacatcttaaaaatatagagagaattctaaattcagctgaaggcaaggtataacggtcacctacctatttgattatatgttgattgataacatattaaatagagaacaaataagagaggtcctttacatgacaaatttgcatgaaataagcagattaaccaagtatttatttttcatcttgttataatgcagagcaaatgtagagaacagcaaatgattgatgcagttaaagctcaatatgcctttttttactggatactgtacatttggctaaaagcttttattgtttgatgttgtgtttcttgactgtttattcagaatcacagtgtatccaaatcttcagcttgaatttggaggcagattcttagagtgaaaaagcctcagtttccatattaaaaatgttttaaatattttgattgaattagtaccaatgtaaaatctagtttcttcctgaaggaggatccctggcgctgtcctgccatgtctcaaaggaatgtttgagaaacttcatctaatattagttataaggttgtggaatttatgcttggcccaccttccaagactggcactgcccaacagacaccgctgaaatcatgtgggtatccctaggatggccttcagagccctcaaacttacaagcacctggtagttgacatcatatggggaattttctattcaccgtacttatccaaaaatctcttttaaaaagtaaatttgtgcaacaacgtttatttgaaagataatgtcttctcaaaatcagaaactgcagtggtaattaaattaatagaaaagagaacaaactgcaggtttagaaaaatggttttcatattcaccattcttccacctcattgaattgcatgctgtagttctagcttttctgctataatatgtaaatatgactgtagccttttaagcttcagtctcagcagagaatttcctaaatgcgtttgacctaatgaaactgatcatggcttcccacttaggtttttcttcttatagctttatagaactatataataatatggacttgctgtgtaatggaattaaagtgcttttgcacaataagttctgcaaaaccctctcattcatgaaaaggtgctccttgctagacagaaacttgctgatttacagtattgttatttttgtctaaagttctgtaaatacatgctttaatgttatctttgagaaatctatgtaaataatatagtctacaacatagagactgtataattctgtgttatatatgtgcctagtgctctgttggcactcaataaattttaagtaacaaaattgataatcatatagcgaaggcatatttttcttccaagctcaagtcaggattgtgactatatattaatgagactcagtaatccaacccacacctgagaactcgtctcattactttatagtcatgtcatgtatgtttttttaaccatgaaatgacaataaaatgattttt

SEQ ID NO: 191 - DNA, 983 bp, Homo sapiens
  misc_feature: Incyte ID No: 040290.1
gcttctggaaacatttcaagggagctagaggcaatgttacagtggagatcagagaagggatggggcagtgagctcttgtccctaggggaaatctcttttcctccacgtgacaggagccagtgctccaacagcatcagaattacacttagccacaatgactgatgcgtgtgtgtgcctgtgcacatgtgtgtgagcgtgtgtgtgagcgcacgtgtgtaagggggtgatgatggaaacatgatatgcatccactatggggttgcgttgcaaaatcacagctgcacccctcccaaagtcacatggcagaggggaaatggtcatagctttcctgtgtgatgtcctctccagggagcaccgacgactcaggcttgcctcagctctgcgaggcccagactccacactcctccctggggccggctctccttcctcttgactctcagatccccagcccatccacctccaagttctttttttgtttatttgttttgcttctgttttctgtaaatatctatttcttattttggacatgcagggatcaattgagattctggagtggggggaggggcggatgactgggtctttttattttttcctttctctcttggattttggtgtttgaacttgaaaaaaataattacaagtatatatataagcaaatgacttacctttaaacaaaagaaataagttgatttcattcttttgatttatcttgtttctcattggggtcgggtgggggtggggggtcttttgggtggagggcttttttgtgagctgtatagatttccagtttggacttgttcaaatgatgcaggaacaaaaattaaaacgaattaaaaaaaagacaacataaaaaaacaagaaaaactttgtgatgtataaaagctgtaaatagtcaaagattctttctcttttctaatggcaaattatttctgtcactttatattcaaaaaataaagaaacctaccacaaattatcagggttaa

SEQ ID NO: 192 - DNA, 4196 bp, Homo sapiens
  misc_feature: Incyte ID No: 399465.3
  unsure 1737-1763: a, t, c, g, or other
gcggaggccgttcctggctttgtagctcgctcaagatggcggcgcagcaccccgcgggatacgcctcagcgcgctttgcccgaagtttttacatacaaattctactagtcacacctggccattcagtgcagttgctgaattaatagataatgcttatgatcctgatgtgaacgctaaacaaatatggattgacaaaacagtgataaatgaccatatatgcttgacattcaccgacaatgggaatggtatgacttctgataaattacataaaatgctaagctttggcttcagtgacaaagtcaccatgaatggtcatgtcccagttggattatatgggaatggcttcaagtcgggttctatgcgtctgggtaaagacgcaatcgtttttaccaaaaatggagaaagcatgagcgtgggccttttgtctcagacctacttggaagtcataaaagcggagcatgttgttgttccaatagtggcattcaacaagcaccgacagatgattaatttagcagaatcaaaagccagccttgctgcaattctggaacattctctgttttccacggaacagaagttactggcagaacttgatgctattataggcaagaaggggacgaggatcatcatttggaatcttagaagctacaaaaatgcaacagagttcgattttgaaaaggataaatatgatatcagaattcccgaggatttagatgagataacagggaagaaggggtacaagaagcaggaaaggatggaccagattgcccctgagagtgactattccctgagggcttattgcagtatattatatctaaagccaagaatgcagatcatcctacgtggacagaaagtgaagacacagctggtttcgaagagtcttgcctacatcgaacgtgatgtttatcgaccaaaatttttatctaaaacagtgagaattacctttggattcaactgcagaaataaagatcattatgggataatgatgtatcacagaaatagactcatcaaagcttatgaaaaagttggatgtcagttaagggcaaacaacatgggtgttggagtggttggaattatagagtgtaatttccttaagccaactcataataaacaagatttcgactatactaatgagtacagacttacaataacagcactaggagaaaagctgaatgattactggaatgaaatgaaagtgaagaaaaatacagaatatcctctaaatttgccagttgaagatatacagaagcgtcctgatcagacatgggttcagtgtgatgcctgtctaaagtggcggaaattacctgatgggatggatcaacttcctgaaaaatggtattgctccaataaccctgacccacagttcagaaattgtgaggttccagaagaacctgaagatgaggatttggtacatcccacttatgaaaaaacctacaaaaagaccaacaaggaaaaattcaggatcagacaaccggaaatgatccctcggattaatgctgaactgttgtttcggccaactgctctttcaactccaagcttttcttctcctaaggaaagtgttccaagaagacatctttcagaaggaacaaattcttatgcgacaagacttctaaataatcatcaagttccacctcagtctgaacctgagagcaacagcttgaaacggagactttctactcgttcctcaattttgaatgcaaagaatcggagattgagtagtcagtttgaaaattcagtttnnnnnnnnnnnnnnnnnnnnnnnnnnntcatcatcttagaagaaaacagtacccccaaacctgcagtagatcatgatattgacatgaaatcagaacagagtcacgttgagcaaggtggtgttcaggttgagtttgtgggtgacagtgaaccttgtggccagactggttcaacaagcacctcatcatcccgatgcgaccagggaaatactgcagctacccagactgaagtaccaagtttagttgttaaaaaagaagaaactgttgaagacgagatagacgtaagaaatgatgcagtgattctgccctcctgtgtagaagctgaagcaaagatacatgaaacccaggaaaccaccgataaatctgcagatgatgcaggctgccaattacaagaactgagaaaccagctactccttgtcactgaggaaaaagagaattataaaagacagtgtcatatgtttactgatcaaatcaaagtgttacaacagaggatactagaaatgaatgacaagtatgttaagaaagaaacttgccatcagtccactgaaaccgatgctgtatttttacttgaaagtattaatggcaaatctgaaagtccagaccatatggtatctcagtatcagcaagctttggaagaaatagaaaggctgaaaaaacaatgtagtgctttgcaacatgtaaaggctgaatgcagccagtgttccaataatgagagtaaaagtgaaatggatgagatggctgtgcagcttgacgatgtgtttagacaactggacaaatgcagtattgagagggaccagtataaaagtgaggttgaattgctggaaatggaaaagtcacaaatccgttcacagtgtgaagaactcaaaactgaagtagaacagttaaaatctacaaatcaacagacggcaacagatgtttcaacatcaagtaacattgaggagtctgtaaatcatatggatggagaaagcctcaaactccgatctcttcgagttaacgtaggacaactgctggctatgattgtgcctgatcttgatcttcagcaagtgaattacgatgttgatgtagttgatgagattttaggacaagttgttgaacaaatgagtgaaatcagtagtacttaaagtatatgttatgtaagataaaatatttgctcaattcttttggttgtacagctttcaaaatataattaattttgttttatagatatgataggcaacagactgaaaaccataatctttactgtattctatgcattcaaatgtggtcacaaatattgtggacacattatcttatgttttgaaatacctgtgaattgttggcattgagcagctgaagctaactcatgactctgttttgaatgtaaatatttgtaattaagcctgcacatatttttttattgccctagagtactcaagtgtttttcaccaagagcttttcaggttgcccctaagctttgtgcaattttttctggttccccaaagtgtatttttctctaagtcgagggctatgccataatacaaatggaaatgttacctttgattttcttataaaggagtttaaataggatttttaaataatgtagtaacactcctgatacaactctggttataagtgaattgagcattaatgtttcttttgtataaattcctgtcctgaaatattttattcatgaaaataaggtaagcaaaaaccaactccattttgccaggattttgttgtgctgagattgccaatcacggttaaacacaaagtgtttttatagaatgaagaaacagtctttaacagaaaaaaggtattgaaatattaaatggccaccaagtttactttgaagcccatttttggctgtttagtcagcatgaagtgggcatgataattttttaatatttctttttgtgaaatttcctgtacagccttttgtaggattactacaggttaatgtgagttgaggaagacagtctttctcaaacaatactacataccttttattatattacaaacctaagtgttttatatcctagagtcaaggaacaaatttccttaggattatagtattacatgccataaaatactatgctttattggtcccatgttttgtgcaattttaaagagatggctttctattaagtataaactatgtatatataagaaccatattttccacaactaaaatgtgcattattttttccaaagttttatcattgctatttatttttacctttgtttttgaacattcaatccgttcattttgtatgtatgcttaatacgtgtcggtcatatacagtattgaatttttactgtatagtaattctggaaagagcaaataaatgaagattgtttttatttgcctgataaagtaattgaaagtgtatttttggtatgaagctggttttctgtcacaattgtaatttcccaaattttaaaatatcttataataaaataaaaatatatgatggctaactgttc

SEQ ID NO: 193 - DNA, 5943 bp, Homo sapiens
  misc_feature: Incyte ID No: 898850.21
cccgcccctccggctagctcgctggctcccggctcctcccgacgtctcctacctcctcacggctcttcccggcgctctcctggctcccttctgccccagctccgtctcggcggcggcgggcagttgcagtggtgcagaatggctgacctcagtcttgcagatgcattaacagaaccatctccagacattgagggagagataaagcgggacttcattgccacactagaggcagaggcctttgatgatgttgtgggagaaactgttggaaaaacagactatattcctctcctggatgttgatgagaaaaccgggaactcagagtcaaagaagaaaccgtgctcagaaactagccagattgaagatactccatcttctaaaccaacactcctagccaatggtggtcatggagtagaagggagcgatactacagggtctccaactgaattccttgaagagaaaatggcctaccaggaatacccaaatagccagaactggccagaagataccaacttttgtttccaacctgagcaagtggtcgatcctatccagactgatccctttaagatgtaccatgatgatgacctggcagatttggtctttccctccagtgcgacagctgatacttcaatatttgcaggacaaaatgatcccttgaaagacagttacggtatgtctccctgcaacacagctgttgtacctcaggggtggtctgtggaagccttaaactctccacactcagagtcctttgtttccccagaggctgttgcagaacctcctcagccaacggcagttcccttagagctagccaaggagatagaaatggcatcagaagagaggccaccagcacaagcattggaaataatgatgggactgaagactactgacatggcaccatctaaagaaacagagatggccctcgccaaggacatggcactagctacaaaaaccgaggtggcattggctaaagatatggaatcacccaccaaattagatgtgacactggccaaggacatgcagccatccatggaatcagatatggccctagtcaaggacatggaactacccacagaaaaagaagtggccctggttaaggatgtcagatggcccacagaaacagatgtatcttcagccaagaatgtggtactgcccacagaaacagaggtagccccagccaaggatgtgacactgttgaaagaaacagagagggcatctcctataaaaatggacttagccccttccaaggacatgggaccacccaaagaaaacaagaaagaaacagagagggcatctcctataaaaatggacttggctccttccaaggacatgggaccacccaaagaaaacaagatagtcccagccaaggatttggtattactctcagaaatagaggtggcacaggctaatgacattatatcatccacagaaatatcctctgctgagaaggtggctttgtcctcagaaacagaggtagccctggccagggacatgacactgcccccggaaaccaacgtgatcttgaccaaggataaagcactacctttagaagcagaggtggccccagtcaaggacatggctcaactcccagaaacagaaatagccccggccaaggatgtggctccgtccacagtaaaagaagtgggcttgttgaaggacatgtctccactatcagaaacagaaatggctctgggcaaggatgtgactccacctccagaaacagaagtagttctcatcaagaacgtatgtctgcctccagaaatggaggtggccctgactgaggatcaggtcccagccctcaaaacagaagcacccctggctaaggatggggttctgaccctggccaacaatgtgactccagccaaagatgttccaccactctcagaaacagaggcaacaccagttccaattaaagacatggaaattgcacaaacacaaaaaggaataagtgaggattcccatttagaatctctgcaggatgtggggcagtcagctgcacctactttcatgatttcaccagaaaccatcacaggaacggggaaaaagtgcagcttgccggccgaggaggattctgtgttagaaaaactaggggaaaggaaaccatgcaacagtcaaccttctgagctttcttcagagacctcaggaatagccaggccagaagaaggaaggcctgtggtgagtgggacaggaaatgacatcaccaccccaccgaacaaggagctcccaccaagcccagagaagaaaacaaagcctttggccaccactcaacctgcaaagacttcaacatcgaaagccaaaacacagcccacttctctccctaagcagccagctcccaccaccattggtgggttgaataaaaaacccatgagccttgcttcaggcttagtgccagctgccccacccaaacgccctgccgtcgcctctgccaggccttccatcttaccttcaaaagacgtgaagccaaagcccattgcagatgcaaaggctcctgagaagcgggcctcaccatccaagccagcttctgccccagcctccagatctgggtccaagagcactcagactgttgcaaaaaccacaacagctgctgctgttgcctcaactggcccaagcagtaggagcccctccacgctcctgcccaagaagcccactgccattaagactgagggaaaacctgcagaagtcaagaagatgactgcaaagtctgtaccagctgacttgagtcgcccaaagagcacctccaccagttccatgaagaaaaccaccactctcagtgggacagcccccgctgcaggggtggttcccagccgagtcaaggccacacccatgccctcccggccctccacaactcctttcatagacaagaagcccacctcggccaaacccagctccaccaccccccggctcagccgcctggccaccaatacttctgctcctgatctgaagaatgtccgctccaaggttggctccacggaaaacatcaagcatcagcctggaggaggccgggccaaagtagagaaaaaaacagaggcagctgctacaacccgaaagcctgaatctaatgcagtcactaaaacagccggcccaattgcaagtgcacagaaacaacctgcggggaaagtccagatagtctccaaaaaagtgagctacagccatattcagtccaagtgtggttccaaggacaatattaagcatgtccctggaggtggtaatgttcagattcagaacaagaaagtggacatctctaaggtctcctccaagtgtgggtctaaggctaacatcaagcacaagcctggtggaggagatgtcaagattgaaagtcagaagttgaacttcaaggagaaggcccaggccaaggtgggatccctcgataatgtgggccacctacctgcaggaggtgctgtgaagactgagggcggtggcagcgaggctcctctgtgtccgggtccccctgctggggaggagccggccatctctgaggcagcgcctgaagctggcgcccccacttcagccagtggcctcaatggccaccccaccctgtcagggggtggtgaccaaagggaggcccagaccttggacagccagatccaggagacaagcatctaatgatgacattctggtctcgtcttccgtctcccccgtgttcccctcttgtctcccctgttcccctctcccttccctcctcccatgtcactgcagattgagacctacaggctgacgttccgggcaaatgccagggcccgcaccgaccacggggccgacattgtctcccgccccccacacttccctggcggccccaactcgggctcccgggtccttggccccctttcccgggctgtccactagaccagtgagcgcttgggcgccgtgctgggcagcccgctaggctcgccttccctcctgctttgcgtgcccggggcagcagcagccctgccccacacctcctctcactccccagcctgggcccatctccctgctttggtcttgccccatcactgcgccactgctccgtggaggaggttgggagggggttggggtggttgaggctaagttgggatctaggagaggagaaccagattctatcctcatctttttttggttctttggtccaaacccaaaagaaactgacatgccctcccttctccctggatctacctggagggaagagtggaggtggattccgagtggtgacaggacgctgaccgtggagcttaagccactgcctctccctctggtcccacaaatgggcgcccccccctccccatgcaggtggtgtcgggcccttcttgctgccctgccccaagttgggggtcagtgctgcctgtccccatgcttaacatacccgcctagctgctgtcacatttttcttgttttgtccttttatttttttctaataacctaaaaactggcaaaatagttctgcaggttgaagccatgtctacatgaaagtcctcagtaagtgttagagggaacagggcggagatatccttatgccacccccgctggaggatgtgggcagcttagggccctggaggcggtgcggcagggaagaggggtgcagaggctgtggctggtgagccggtcaggcacacaaggggcccttggagcgtggactggttggttttgccattttgttgtgtgtatgctgcttttcttttctaaccaagaggctggttttggcatctctgtcccattccctgggatctggtggtcagccctaggataaaaagccagggctggagaacaagaaagggccaggagatggaattccttcaggccggcacccacaccctaggacatgtaagccctcatgtccaagggagcctcatgcagatagtaggaaatcaggtctggaaatttaaaaataaaaggcatgagactaaggctatctgcttcccttatgccctgactggagaggggagggaggagaggcaaggcccacagagggcatcccagctaggccttgggatggctgcagtgaggagaaatcccgggaactgtattgacacaaagattcttattgcacttgtattttttgtattaaagtttgcatggtttctaataaaggattcaaacataagtttgtagtgaaatggcctgggagattccaagggcttctctggagggggattggctgcagtgtagatttgcctctgaggaggctgccccagacttggcctcctcatgccccctcctgacctctgcccttctctggtcctggcatccctggagaaggtaggggtcttgacctaagtttagatttgatctccatgtgcagggaggctgtcctgggcctgacaggtcctccccctttctgaggtagcagtgccttgtggaggtttgacaccatgtccctagctccccaagcacacaccaggaaactgcaggggctcacggaggaagtgctgcctgggccagggggaccagctttcctccgtagagaccatgtgcagaacacttctgctgtgccaagaacatgagggagccagtgttttgtcagcaggaagaaagggcctgctgggatgaaagtgggaaggaaacagggttgcgtagtcaggagacacctcaggggcaacagcacaggcccagagtacctgctgcctccactgcgtctgtcctggggtcatgaggatgctgaggttgacgacaggttccaggtcctttcactcctttggccaaaggttgggggtaggtggcccaagtggcgtgctctctaggtagacaacaggagtggtcagagttccctcaaaggatcctccactccagagcacctgagaaggccgggaccagaggccctgtgtgatgtgtactccgcagctgtttggggtgggacatttctgtacttctcgatttgcttatggctcagccattacctgtgtcagtccatgattctgttgtaacagttttaagagtaaataaataaagctgcctgatgtcccatcaaaaaaaaaa

SEQ ID NO: 194 - DNA, 2726 bp, Homo sapiens
  misc_feature: Incyte ID No: 201356.1
ctgttttcatttgctctcttgaccaaaggataggactttagttctttaagcattattttaaacactatattgatacaaaaatatcttgcttactctaaactttagagtctaaatgaagctttttctcagtacaagattctgagtatcataaaatggttatttaattgaaacgtagtgtggtatactcttgatggttagaactcttacagccttatttatttttaagtttgttacagccaaagggttggagtgtgccagtgcacaggtagactaaggaaaacattatagaggagtgaagagaacagaccattgaaaagactattatctgaccagcggaggcagaaaagagaggaacccagttgaataggatccaatccctggttagcctctacacaataatagggagacaaggattaggagccatacctcccagagcaaggtatctttctagagcaaatttctctttctagaaggggagggtcacagggtcacagattcaccaaagctgaaagggctgaggagctcatggtagcctgggttgacctactctggagcacggtgtcttccttctaaactgagtgactgtagtactatctgtgcctctgatggtaataaaactgacaagatgtctaatttttttttaagtaggaccaaaggaaaacaagatttagatagtctgactttgcttttgaacaacagacattgcaagtcaaaattgttgtcaaatttacatatggtaaatgatgaactttaaaaatgtgtccaggtgttagatgagttcattagactcttttaatgctaatggctagtacgtttaaacaaaacagcagttctctgctgcaatattcccattgaccacttaaatgaccataagtggtcatttaagaacatgttagggttagccctgatctgaatataaaagtgagaaaagggctacagtgcatttcttggtaacttaaactgagtcttgaagttataatgatccattcgagttctgtgatccttattgttcttaattgtgtttctctacgtattgttacagatgagccatacgtttctttgtatcaatgtagacatgacttcagatacctctgaggacctacccagcagtctaggaccctgggccaagtgctgggactatggtactaaatccagtagatgggctgtgtagcaactctcccagggaacacactagggtacttagggaggtgctttgtggagcatgttgaagctttgagatctgagcaggaggcagtgatgtccctggtctattcagggaaagatttcagtgtgaaatggtaaacatccaattgacaggatttagattttgcttagtttttctgctttttaatgtttctatcccccatctcagtgttttctttatccatcccagtgatgccttatttgaaactgggcttaaactgcaaaaagaatgaagttggatttaggaagctgttagatcattgagtggtgttgagagtgaagtttcactagcagggaagtttccttgagcctaaaataaaaagaaaaaattaaaaagaatcagtttttttaattaaaaaaatagaaagctgttaggctcctaattcgtggggtttttttttgtaaaaacagtttagataatcctgaatgcaatcattaacttggttgctaattacaagaatgaaaattataatggaaaaggacaaaataatataccagctggtttgttattatagtccgtgtattaaaatactattgaaatacgttaaaggtaaatttttaaggtttaaaaaaaatttagtaacttacagggatggagaatttagatgtcagaggtggggagatttatttttataaggtaatttttatcctgataaggacttaaaaaaaagttttgcaactgaaattttaaagtaaacatgttaagtacagttaaaaagtaagcattgtagtaaatagtggattctctggtgtgtattttttatctcagtgttgaaaattggaaaagaatggactgaagtctaaaaactggaataatgaaggacactaaatgcctttattgtagatactatgtttgtaagtctatagctaagcaacttaagccaaaaaggtctttcaactgaagctttaatcaacttattttggagatgttctcttcccttatctcatgcgtcatccctaaaataataagatacatgggatcaaatagcccttgccttttcaacacaaatcagttggaaaattatggtttgagtcctgttgctgccatggcttctgtttctcagaaatgagtgtgtatgaacataccaatctatgtaataggctacctttttttgtcttctttggaactttgtacacaaaccaagacaatatcagggtgacaggtgaatgaacttaaattctcagtcttgtctattcaccaaaaaagtatactgcctgttttttctttaattattcaaggttgatgacttttaggaacatgttttatactgtattttttaattaaagcaagtgccttgatgtaattccatgtaaatcattgcttaaccctcttatgggatgaggatgagttattaatgtattgcagcctactggaaaggagggggagttggttaatagcagatacttttcttctagaagcttatgttttatgctgtttattatgtaagatcctgtatgtgtgttgagatttagaggtttcatttgttttgtctgctaataaattgttactctaataatacatt

SEQ ID NO: 195 - DNA, 550 bp, Homo sapiens
  misc_feature: Incyte ID No: 223285.1
ctgactgcaacctcttacccaagctccatattattaagattgtggccaagaagtacagagattttgaatttccttctgaaatgactggcatctggagatacttgaataatgcttatgctagagatgagttcacaaatacgtgtccagctgatcaagagattgaacacgcatattcagatgttgcaaaaagaatgaaatgaagctgggctgttttctgtcttatttctcagttgagtgagcaaggatacgaaaacagtgtgtttgaaaacaaattaggtttgggttcaattccttcaatttttaaaaaactggtctctgagagttttttaaatcattgagagcctgtttttcttctctaaaacattagtttaattttcttcaaaatgaaaatactgctttgtaattacaaaatgagacacacctatcttgatattttaaagcaatatcagagggtgtaaagaaggacattttaacaatcgccttcaattttactccacttaattaccgaaaacttactggagaacatgttccaaatcttcagtatcctgtt

SEQ ID NO: 196 - DNA, 2960 bp, Homo sapiens
  misc_feature: Incyte ID No: 318000.4
ggacgggcgtggggggtagggcgagtcatatgatccgctcggcttcctgggtctggctgctgccgcccgccggtgtccgcccgtgtcgcgccgggggcaccaaggagccgttggagggtccgggcggaggcccgcttcgtgtggaagtcgtcgacgccgccgctcgtccgtcctcccgtccgttctcgctcccggccgccatcatgctggcgctcatctcccgcctgctggactggttccgttcgctcttctggaaggaagagatggagctgacgctcgtggggctgcagtactcgggcaagaccaccttcgtcaatgtcatcgcgtcaggtcaattcagtgaagatatgatacccacagtgggcttcaacatgaggaaggtaactaaaggtaacgtcacaataaagatctgggacataggaggacaaccccgatttcgaagcatgtgggagcggtattgcagaggagtcaatgctattgtttacatgatagatgctgcagatcgtgaaaagatagaagcttcccgaaatgagctacataatcttctagataaaccacagttacaaggaattccagtgctagtgcttggaaacaagagagatcttcctaatgccttggatgagaaacagctaattgaaaaaatgaatctgtctgctattcaggatagagaaatttgctgctattcaatttcttgcaaagaaaaggataatatagatatcacacttcagtggcttattcagcattcaaaatctagaagaagctgaagcatctcctgaagtcttccagtccttcttggctataatcctagaattattgtccgttcctctgaagtaattcccagaatacggtccttcctaaaccccagaaattgcctttttcagagtttatttctcatgtgcactgctgaagatgaatatccctaatccttcataaagaatcagctagagttgtcatgataaagtcagcacacacaaaaaggcttcttacacatacctgtcttaaaccatgtgtagagctttaaaaacagaaaaaaaaccccatatacttatgaccatcttaaatcaagaaaattgcatatttccattctggtctttctgggccagatttttatattggttttcagtaaatgtctatctataatatttcattatagagtccagtagcttaatactgacactgacttgatacagcatgaagtttctagtgccacacacagtatttagaaaacctttaggcgtgaatgactcatgtgggatatatgtaaacataatgtttattttatctcacaaatgcatgtgaaatgtataattacatcttaggaatccaaaatggtctgcagagagtgagcggaggcaccagatcaatgttggttctttgcactggtgagattctgcctgatgaatattaaagatatcctgctttctgagaactctatcaccagatggcagttgggatatgggaggaactaaagcatcctgttttgtatctgtccagatcattatttctgtctcttgttttttcttcctggttcaggatacttttttaaggggttgagaattgaagattttccaaaagcgttcatgaatttagagcattccacccaatataataaaacctgttaagaatgtcagtctttgttcaaacatctgtttgttctatctccagtcattaaatcagtgctgctgcatgacactcttaactcctgactttttatatccagtcataaagttgactttcagcacaaaagatacttataaacaaataaaaaattttatttttctcttactgatgtaagctttggcactcttttgactggtgccattagacatcttgattattgtgacaactctagacctgcctgctttatctaatgtaatcatgctcaatgtctacaggttgtttaataatcagtcacacagagaactgaggaactgatgctgtttgtttgcttctatgatacagagatgtctaaaaacttcaaatggacatgttttgtagtttagcgacttccgtatacataaagggacatattaatactggttcatttgtaaattattattcatatagaccactgtagtagataaaactctatggtacacctgcttatgtgttgcctcacactgtgtgtgattttgtttcttttgttaagcagcacttatgtagactgcatttccaaatgtgttgagcactcagagtgtagtcaacagtaagttcttttaatgaatatcagttttaatttatagactgccatggccttaaaaatattctgtacaatatactgcactgtgttgcacagacactacttgcttttctccattcatatttttatgagtagaatctgggcttttaaatttctcttcttattctttgaagcatgttgcatactaccctggtgggatggatggttctgtaaatgaagggatatttaaacttgctactgttgttcaacaccattaatggtcagtgtgaaccattacaaagaatgtggcaacttgcttgtgcctaaaaggaggaattggaactagaatgtgtgactctgtggggactgcataggtttgttaattgacctatagctaaaccttaatgtgtttgtgtgtctatacattgctttccgcatttcaagacatccagacgctattaccaacattttcctgtgcattaacctctgcatgtgaaaacttttaacagttactgaactatgtaaatatgtgaatttttttatttaggtggatgcattttttgtctgtttactgctcttctcagctttattcaataaacttgcattttaagggttgtattggcaattttaacttaaaatgtgcatcatgatggaaggtgcagacttttttggaagtttccgagaggagggtctatagaccatttgtcagaaatcagatcagccctcaaagaatggggtctgtgggctagttaaaatagaaataaacttttaaaatatccac

SEQ ID NO: 197 - DNA, 4885 bp, Homo sapiens
  misc_feature: Incyte ID No: 977887.1
  unsure 802: a, t, c, g, or other
ccggagtggtcgcagttcgggcggaggccgggccaggcggggctgtagggctggggcaggcggcgggctgcccggcgggacagctgcggcagccggcggggggcgtcctgagttggcggtcgagggcgctgccagctcccgaggggccgctcgggccccttccggcccgggtctggttgggccgcaggagcagggcgggctgcggcgcccggggtctggccctggcctacgggctaagcgcccggccccggggccgcggatccggcagccatgtgtggatcttgaagcgccatgtggtcttctgaagcgctttgacagttctaaagggctttatattgcaaactgatcaaagcgcttcgtagccccggaagcgcttaggcatctccgaagtagcgctgggcaaagtgaaggcttcctgatctcagaagcacgttgtgggcttggaaaccgacggcagcctttagtcaattttggatcgctttgacttctccaacacggtttggcatctctgaaaccttgagaactgtgatgggcagtggaaagaagagggaaaggtgcccatggcgtccgagcggggcaaggtcaagcacaactggagcagcacgtcggaagggtgtccccgcaagcgcagctgcctccgggagccctgtgatgtggccccctccagccggccagctcagaggtctgcgtcgcgttctggagggcccagcagccccaagcgcctgaaagcccagaaggaggacgatgtggcttgctcgcggaggttatcctggggctcatcccgccgcagaaataactcctnctcctccttctccccacatttcttgggccctggtgtgggcggggccgcctccaaaggctgcctgattcggaacactcgggggttcctgtcttcagggggatcccctctgcgtcctgccaacgcctctttggaagaaatggcttctctagaggaggaagcctgcagccttaaggttgattccaaagatagttctcataactccacaaactctgaatttgcagctgaagctgagggtcagaatgatacaattgaggaacccaacaaggtccagaaaaggaagagggatagacttcgagaccagggctccacaatgatctacctgaaggctatccagggcatcctggggaaatcgatgccaaaaaggaagggagaggctgccactcgggcaaaaccaagcgcagcagagcatcccagccatggagaaggaccagccaggagtgaaggaccagccaagactgcagaaggagcagccaggagtgtcacagtcactgctgctcagaaggagaaagacgcaaccccagagatcagcatggaggaggataagacagtgccagagaggagcagcttctatgacaggagagtagttatagaccctcaagagaaacccagtgaggagccccttggggaccgaaggactgtcattgacaaatgctctccacccctagagttcttggatgactctgactctcatttagaaatccaaaagcataaagatagggaggtggtgatggagcacccctcttctggaagtgactggtctgatgttgaggagatctccacagtcagattctctcaggaggaacctgtctccctgaaaccttcagccgttctggagccttcttccttcaccaccgactatgtcatgtaccctcctcatttgtacagtagtccttggtgtgactacgccagctattggaccagcagccccaagccttctagctacccctccacaggcagcagcagcaacgatgcagcccaggttgggaagagcagccggagccgcatgagtgattattcccccaactctacagggagtgtccaaaacacctccagagacatggaggcctcagaggaaggctggtcccagaattctcgttcatttcgcttctccagaagctcagaagaaagagaggtgaaggagaaaagaacattccaagaggagatgcctccgcgtccttgtggaggacacgcatccagctccctgccaaagagccacctggagccaagcctagaggagggcttcattgacactcattgtcacctggacatgctctattccaagctatctttccaagggacctttacaaagttcagaaaaatttacagcagctccttccctaaggaatttcagggctgcatctctgacttctgtgatccccgcaccctgacagattgcctatgggaggagctgttgaaagaggatctggtctggggggcctttggctgtcaccctcattttgcacgttactacagtgagagtcaagaaagaaatcttttgcaagccttaaggcaccctaaggctgtggcatttggagaaatgggcttggattactcttacaagtgcaccacgcctgtcccagaacagcacaaggtatttgagagacagctgcagctggctgtgtctctaaagaagcccttggtgatccactgccgagaagctgatgaagatctgctagaaatcatgaaaaagtttgtgccccctgactacaagatccataggcattgcttcaccggcagctacccggtcattgagcccctgctgaagtactttcccaacatgtctgtgggcttcacggcagtgctgacatactcctctgcctgggaggcccgggaagccttgaggcagatcccactggagagaatcatcgtggaaacggatgctccctatttcctccctcgccaggttcccaaaagcctttgccagtatgcccacccgggcctggccttgcatacggtccgagagattgccagagtcaaagatcagccactctccctacaccttggctgccttgcgtgagaacaccagtcgcctctacagtctttaagcagagaaggtacagtcctcgggagtctcctagaaaagggcgaccagcagcctgacagaacacaggctggcttgaagtctgtgtctcaggtcgaggatgtgtttagagagctgattggaacacagaaaaccaggacaggatgttttcctccaagcgggtcataaggcttcagcttctgggtggtgggtggggtggggtgggcatggaatgaggggtatggggactgcctgtaatagcactgggattttgcctcccagccaaaatgctccagggtaggcagcaaagaagaaagagtgcgatatgagggtacagtgagtttggcagtccaaattctgttctctgcagcctgtttttgagtagttggtgaataaagtcacccgcctacttgtctaagcacatgtgggtgtgtaactcagttcctggttctcggttctaaaaacagacttccaactgggaaactttttgggggaaattaactggacacctatctcggaggtttattttcttgcaaccagtgaagtcgtcctcctcccttccctggataactcttcagtttgactgtcactgttctggtgtcaactccagcgtcggcacaggcagaaggacttcagctgctggtctcattggttccactgccattgatatgggggggtgcagaggagcactcattgtccatgatggagatccaggacagactgggggactccgggaagaggctttcttggggaagaggaccccaaaggaggtacttcctcctcactgatgccctcagggctgctgtgtgggtgtgttaagctgataaggttcagtttgcggcggaaactacctgctagtcttgtgtcaggggctgccagcctccttttgttttcacttttgcccccttcttgggaacatttgaccaaaaataatcctcatttcatcttgtgtacagtcctttgtgtaccccgcccaggttgagaggtgaatcagcgtaattctccgaagctctgctgggcagctcagccatgttacattgtctatgcagaataagcaggcctggtgtctgcaaatgtaccagtccttctcccgcatctcctgggtgcccccttggctttgcctctcctgtgtcctgtctttctgcgttttagaagtgagagcctctccttcaccttttgagcaactgagtcatctcaagtcctgagctctgctctgccgcctgctggtgccttgtaaaggtatactcgttacaggccctagaggttctaatggtccagggttaagtgagaggagactgtactttgtttcaaaggatccttcaccctgatctgcagtgaggtggatagatcacctggagtccctcgtctgtggtcttggaggcttaaattgtaaaatacatcccttatggaatcctaaattcctctaggtgtttttggaaggcgcatttgagccttgtgagctaaaatggaatggatttaatatttcctatctggcatttccatcttgcccctggtacacaagtcactggcctggaactcagccttgattcactgtccgtcttcacggattagctgtgctgttatgttgtctgtgctgcagattggcccatgtgggaagtcgggggggacctgatttcctgcttggaagacttgggggactgccgagcatatcaaagtgtttatagtcaccaagtgaactgcagcacaaccatctcctctccagcaagccctgaagtcagtagtgcctgcaggtgaaaccaaccagccctgtgttagaggaggaaaagcggagatgacatggaagtctccaagcctgtgccatccacctgccaaggaaaagcacaaggtgctatctacttttctctctaggatttagattatcatttatgtgctgttgcacagtgaaacctcacctgtgtgggcgtgaaagctgattggcattgtttttgattcagctttttggatggctaattgttttcactgtgctgtgggaatgcctctgtattttttcccctctttggccatctttttctgaaaataaagtgatggatcctctagccaaa

SEQ ID NO: 198 - DNA, 7116 bp, Homo sapiens
  misc_feature: Incyte ID No: 1094199.1
  unsure 3941-3993, 5899-5939, 6951: a, t, c, g, or other
cggcggcggctgcggcttagtcggtggcggccggcggcggctgcgggctgagcggcgagtttccgatttaaagctgagctgcgaggaaaatggcggcgggaggatcaaaatacttgctggatggtggactcagagaccaataaaaataaactgcttgaacatcctttgactggttagccagttgctgatgtatattcaagatgagtggattaggagaaaacttggatccactggccagtgattcacgaaaacgcaaattgccatgtgatactccaggacaaggtcttacctgcagtggtgaaaaacggagacgggagcaggaaagtaaatatattgaagaattggctgagctgatatctgccaatcttagtgatattgacaatttcaatgtcaaaccagataaatgtgcgattttaaaggaaacagtaagacagatacgtcaaataaaagagcaaggaaaaactatttccaatgatgatgatgttcaaaaagccgatgtatcttctacagggcagggagttattgataaagactccttaggaccgcttttacttcaggcattggatggtttcctatttgtggtgaatcgagacggaaacattgtatttgtatcagaaaatgtcacacaatacctgcaatataagcaagaggacctggttaacacaagtgtttacaatatcttacatgaagaagacagaaaggattttcttaagaatttaccaaaatctacagttaatggagtttcctggacaaatgagacccaaagacaaaaaagccatacatttaattgccgtatgttgatgaaaacaccacatgatattctggaagacataaacgccagtcctgaaatgcgccagagatatgaaacaatgcagtgctttgccctgtctcagccacgagctatgatggaggaaggggaagatttgcaatcttgtatgatctgtgtggcacgccgcattactacaggagaaagaacatttccatcaaaccctgagagctttattaccagacatgatctttcaggaaaggttgtcaatatagatacaaattcactgagatcctccatgaggcctggctttgaagatataatccgaaggtgtattcagagattttttagtctaaatgatgggcagtcatggtcccagaaacgtcactatcaagaagcttatcttaatggccatgcagaaaccccagtatatcgattctcgttggctgatggaactatagtgactgcacagacaaaaagcaaactcttccgaaatcctgtaacaaatgatcgacatggctttgtctcaacccacttccttcagagagaacagaatggatatagaccaaacccaaatcctgttggacaagggattagaccacctatggctggatgcaacagttcggtaggcggcatgagtatgtcgccaaaccaaggcttacagatgccgagcagcagggcctatggcttggcagaccctagcaccacagggcagatgagtggagctaggtatgggggttccagtaacatagcttcattgacccctgggccaggcatgcaatcaccatcttcctaccagaacaacaactatgggctcaacatgagtagccccccacatgggagtcctggtcttgccccaaaccagcagaatatcatgatttctcctcgtaatcgtgggagtccaaagatagcctcacatcagttttctcctgttgcaggtgtgcactctcccatggcatcttctggcaatactgggaaccacagcttttccagcagctctctcagtgccctgcaagccatcagtgaaggtgtggggacttcccttttatctactctgtcatcaccaggccccaaattggataactctcccaatatgaatattacccaaccaagtaaagtaagcaatcaggattccaagagtcctctgggcttttattgcgaccaaaatccagtggagagttcaatgtgtcagtcaaatagcagagatcacctcagtgacaaagaaagtaaggagagcagtgttgagggggcagagaatcaaaggggtcctttggaaagcaaaggtcataaaaaattactgcagttacttacctgttcttctgatgaccggggtcattcctccttgaccaactcccccctagattcaagttgtaaagaatcttctgttagtgtcaccagcccctctggagtctcctcctctacatctggaggagtatcctctacatccaatatgcatgggtcactgttacaagagaagcaccggattttgcacaagttgctgcagaatgggaattcaccagctgaggtagccaagattactgcagaagccactgggaaagacaccagcagtataacttcttgtggggacggaaatgttgtcaagcaggagcagctaagtcctaagaagaaggagaataatgcacttcttagatacctgctggacagggatgatcctagtgatgcactctctaaagaactacagccccaagtggaaggagtggataataaaatgagtcagtgcaccagctccaccattcctagctcaagtcaagagaaagaccctaaaattaagacagagacaagtgaagagggatctggagacttggataatctagatgctattcttggtgatctgactagttctgacttttacaataattccatatcctcaaatggtagtcatctggggactaagcaacaggtgtttcaaggaactaattctctgggtttgaaaagttcacagtctgtgcagtctattcgtcctccatataaccgagcagtgtctctggatagccctgtttctgttggctcaagtcctccagtaaaaaatatcagtgctttccccatgttaccaaagcaacccatgttgggtgggaatccaagaatgatggatagtcaggaaaattatggctcaagtatgggtgggccaaaccgaaatgtgactgtgactcagactccttcctcaggagactggggcttaccaaactcaaaggccggcagaatggaacctatgaattcaaactccatgggaagaccaggaggagattataatacttctttacccagacctgcactgggtggctctattcccacattgcctcttcggtctaatagcataccaggtgcgagaccagtattgcaacagcagcagcagatgcttcaaatgaggcctggtgaaatccccatgggaatgggggctaatccctatggccaagcagcagcatctaaccaactgggttcctggcccgatggcatgttgtccatggaacaagtttctcatggcactcaaaataggcctcttcttaggaattccctggatgatcttgttgggccaccttccaacctggaaggccagagtgacgaaagagcattattggaccagctgcacactcttctcagcaacacagatgccacaggcctggaagaaattgacagagctttgggcattcctgaacttgtcaatcagggacaggcattagagcccaaacaggatgctttccaaggccaagaagcagcagtaatgatggatcagaaggcaggattatatggacagacatacccagcacaggggcctccaatgcaaggaggctttcatcttcagggacaatcaccatcttttaactctatgatgaatcagatgaaccagcaaggcaattttcctctccaaggaatgcacccacgagccaacatcatgagaccccggacaaacacccccaagcaacttagaatgcagcttcagcagaggctgcagggccagcagtttttgaatcagagccgacaggcacttgaattgaaaatggaaaaccctactgctggtggtgctgcggtgatgaggcctatgatgcagccccaggtgagctcccagcagggttttcttaatgctcaaatggtcgcccaacgcagcagagagctgctaagtcatcacttccgacaacagagggtggctatgatgatnnnnnnnnnnnnnnnnnnnnnnnnnnnnnnnnnnnnnnnnnnnnnnnnnnnnnaaacagcaacagcagcaacagcagcaaacccaggccttcagcccacctcctaatgtgactgcttcccccagcatggatgggcttttggcaggacccacaatgccacaagctcctccgcaacagtttccatatcaaccaaattatggaatgggacaacaaccagatccagcctttggtcgagtgtctagtcctcccaatgcaatgatgtcgtcaagaatgggtccctcccagaatcccatgatgcaacacccgcaggctgcatccatctatcagtcctcagaaatgaagggctggccatcaggaaatttggccaggaacagctccttttcccagcagcagtttgcccaccaggggaatcctgcagtgtatagtatggtgcacatgaatggcagcagtggtcacatgggacagatgaacatgaaccccatgcccatgtctggcatgcctatgggtcctgatcagaaatactgctgacatctctgcaccaggacctcttaaggaaaccactgtacaaatgacactgcactaggattattgggaaggaatcattgttccaggcatccatcttggaagaaaggaccagctttgagctccatcaagggtattttaagtgatgtcatttgagcaggactggattttaagccgaagggcaatatctacgtgtttttcccccctccttctgctgtgtatcatggtgttcaaaacagaaatgttttttggcattccacctcctagggatataattctggagacatggagtgttactgatcataaaacttttgtgtcacttttttctgccttgctagccaaaatctcttaaatacacgtaggtgggccagagaacattggaagaatcaagagagattagaatatctggtttctctagttgcagtattggacaaagagcatagtcccagccttcaggtgtagtagttctgtgttgaccctttgtccagtggaattggtgattctgaattgtcctttactaatggtgttgagttgctctgtccctattatttgccctaggctttctcctaatgaaggttttcatttgccattcatgtcctgtaatacttcacctccaggaactgtcatggatgtccaaatggctttgcagaaaggaaatgagatgacagtatttaatcgcagcagtagcaaacttttcacatgctaatgtgcagctgagtgcactttatttaaaaagaatggataaatgcaatattcttgaggtcttgagggaatagtgaaacacattcctggtttttgcctacacttacgtgttagacaagaactatgatttttttttttaaagtactggtgtcaccctttgcctatatggtagagcaataatgctttttaaaaataaacttctgaaaacccaaggccaggtactgcattctgaatcagaatctcgcagtgtttctgtgaatagatttttttgtaaatatgacctttaagatattgtattatgtaaaatatgtatatacctttttttgtaggtcacaacaactcatttttacagagtttgtgaagctaaatatttaacattgttgatttcagtaagctgtgtggtgaggctaccagtggaagagacatcccttgacttttgtggcctgggggaggggtagtgctccacagcttttccttccccaccccccagccttagatgcctcgctcttttcaatctcttaatctgaatgctttttaaagagattatttgtttagatgtaggcattttaattttttaaaaattcctctaccagaactaagcactttgttaatttggggggaaagaatagatatggggaaataaacttaaaaaaaaatcaggaatttaaaaaaacgagcaatttgaagagaatcttttggattttaagcagtccgaaataatagcaattcatgggcnnnnnnnnnnnnnnnnnnnnnnnnnnnnnnnnnnnnnnnnnaattatgttaccttttcatcccctttaggagcgttttcagattttggttgctaagacctgaatcccatattgagatctcgagtagaatccttggtgtggtttctggtgtctgctcagctgtcccctcattctactaatgtgatgctttcattatgtccctgtggattagaatagtgtcagttatttcttaagtaactcagtacccagaacagccagttttactgtgattcagagccacagtctaactgagcaccttttaaacccctccctcttctgccccctaccacttttctgctgttgcctctctttgacacctgttttagtcagttgggaggaagggaaaaatcaagtttaattccctttatctgggttaattcatttggttcaaatagttgacggaattgggtttctgaatgtctgtgaatttcagaggtctctgctagccttggtatcattttctagcaataactgagagccagttaattttaagaatttcacacatttagccaatctttctagatgtctctgaaggtaagatcatttaatatctttgatatgcttacgagtaagtgaatcctgattatttccagacccaccaccagagtggatcttattttcaaagcagtatagacaattatgagtttgccctctttcccctaccaagttcaaaatatatctaagaaagattgtaaatccgaaaacttccattgtagtggcctgtgcttttcagatagtatactctcctgtttggagacagaggaagaaccaggtcagtctgtctctttttcagctcaattgtatctgacccttctttaagttatgtgtgtggggagaaatagaatggtgctcttatctttcttgactttaaaaaaattattaaaaacaaaaaaaaaataaatttttttgcaatcctttcctcagacctggctccaggctaactggaaggcagcgctcccttttttatatagtagaaaaatgaagtttattataagtttttatattttctacttgntcatttggtgcaaactcaagatttcttttaataggtgcagtctttgagataatttgtttttacctgtattgcccttatcttttttaggtaattctttgtactcctgctgtctacctctcctcacaccccagcaccccccattttttcaaaccttggtatctggtg

SEQ ID NO: 199 - DNA, 1160 bp, Homo sapiens
  misc_feature: Incyte ID No: 1094984.12
  unsure 56, 409: a, t, c, g, or other
gagaaatagaatggtgctcttatctttcttgactttaaaaaaattattaaaaacanaaaaaaaataaatttttttgcaatcctttcctcagacctggctccaggctaactggaaggcagcactcccttttttatatagtagaaaaatgaagtttattataagtttttatattttctacttgttcatttggtgcaaactcaagatttcttttaataggtgcagtctttgagataatttgtttttacctgtattgccctttatcttttttaggtaattctttgtactcctgctgtctacctctcctcacaccccagcaccccccattttttcaaaccttggtatctgttgggtgaacagtataatcttttcatctgcttttagaatgtgggatatttccagtacctacttntttttttctttttttgctgaatccaaagatatataaataaaatatatatattttataaagatcagaatgatataaaggagatacatgtttcttcctttaaaaaataaacggaagttacattgttaatgttcatattatgatgccacttttctaaactgcatctggattgaaaggtgtaaatatcaataacagtgctacttagttatcagtatttaatatctgaggtgagttgggggtatctatattaggggtagggtattacagaagataattggcttgatgtcctagaagttctttgatccagaggtgggtgcagctgaaagtaaacagaatggattgccagttacatgtatgcctgcccagttccctttttatttgcagaagctgtgagttttgttcacaattaggttcctaggagcaaaacctcaaggattgatttattgttttcaactccaaggcacactgttaataaacgagcagggtgttttctctcttcctttctaatatatggagtttcgaagaataaaatatgagagcaatatttaaattctcaggaattgacttatactcttgagaatgaattcagtttcaatcaagtttacattatgttgcttaaaaaaatagaaattattctttatcttgcaaagaattgaaaccacatgaaatgacttatgggggatggtgagctgtgactgctttgctgaccattttggatgtcattgtaaataaaggtttctatttaaaattggaa

SEQ ID NO: 200 - DNA, 3102 bp, Homo sapiens
  misc_feature: Incyte ID No: 244785.3
  unsure 1298-1596, 1927: a, t, c, g, or other
gcaccgcgctgcgccgtgcccgtgagtccggcgcgcagaggaggaggagaaagctgaccgcttaggccggggtagtggtcgtcgtggttttccttgtagttcgtggtctgagaccaggcctcaagtggaaacggcgtcaccatgatcgcacggcggaacccagaacccttacggtttctgccggatgaggcccggagcctgcccccgcccaagctgaccgacccgcggctcctctacatcggcttcttgggctactgctccggcctgattgataacctaatccggcggaggccgatcgcgacggctggtttgcatcgccagcttctatatattacggcctttttttttgctggatattatcttgtaaaacgtgaagactacctgtatgctgtgagggaccgtgaaatgtttggatatatgaaattacatccagaggattttcctgaagaagataagaaaacatatggtgaaatttttgaaaaattccatccaatacgttgaagtcttcaaaatgcttgctccagtttcactgatacctgctgtttctgaatttgatggaacatgtttcttatgacagttgaagcttatgctaatctgtatgttgacaccttgtaattaaaatacgtaccatgagtactctgactctttattgttgtaagaaaaatagttcatcatcagagaatggtcagtttccattcacccatctgaaagattttaagatgaggttgaattctagtttagagttagcagactacccaaatctggcccactgccaataaagtctcattggaacacagccatgctcatttgtttacatgttgtttatggcgactgccatgctgcaagagcagaattgagtagttgtgatagagacctatggcctgcaaagcctaattaatatgtagccctttcagaaaaggtttgcctgcccctgtcctagtgcaaagtgaatttagagtgagccagattatggaggattctgtgactcttgccaaataattttgacttcatcctgtaggtattaagtcattaaggcgttttaaatcatacagtcaggtttgtatttctgagctgtctataatgaatgatatagaaggtggtttcgaaggaggagactccagacaaggaaaacagaaatcttatgttgccaagttgtctttgctcttaggtgggttatcctggagaaaatggactcaggagctaatactgtctacagtggagcttggtgcaattagaagcaaaagactgtacctaactggaatgaggttactttttatggcttatcaaatgcttgtccnnnnnnnnnnnnnnnnnnnnnnnnnnnnnnnnnnnnnnnnnnnnnnnnnnnnnnnnnnnnnnnnnnnnnnnnnnnnnnnnnnnnnnnnnnnnnnnnnnnnnnnnnnnnnnnnnnnnnnnnnnnnnnnnnnnnnnnnnnnnnnnnnnnnnnnnnnnnnnnnnnnnnnnnnnnnnnnnnnnnnnnnnnnnnnnnnnnnnnnnnnnnnnnnnnnnnnnnnnnnnnnnnnnnnnnnnnnnnnnnnnnnnnnnnnnnnnnnnnnnnnnnnnnnnnnnnnnnnnnnnnnnnnnnnnnnnnnnnnntatatgtgatttcaaattaggtggccttataaatataagcagatggtttctgggcaaaatcaaatgatttctgtctctattttcttgagtaccaattgtaaaaactgaaattaggttgaggaaagtgctttagaaataataaagatgtacaaatacaaggctttggattttttattagttctgcaataaataataggtttatagttcacctgttgttgatctcatcagtggtcgccaagtaagagggtgaatcactcatcccaagagactctgctacctcttagctctggagggtaaaaagcaagggccagagcaaatacattggggaganggggagaaaaaaaaaatcaggctattttaatagccctcacatgccaagtgcttttgattcatcatgtttagttttcataagcttgtgaggtagataatattatccccattttatagaatgagggattttaggctccaatgggttaaataacttgtacaagtacacatactgaatgactgccatgaggagggatgtgaattttggtcacgtgccaacacctacactcttcctaccataccacactggacaggtaattgtctagtccctcctgaaccactggtcacctccccaagctgttaagaggagcgaggggagcagtgaatagcaacagacattctaaaggtgagccagtgactggaatccaggaattggtgctcaggaggtagagaagcatcccggagaactgagccgccttcacttctggctgcaggtctaggcctttctgctctcatcattggctagtgaactgctccgccgacctcatcaaagagtctgtcttctatcatgtgaagggatcttccctagtgtccaaggtctaccaaacttgtcccgtcatttcctggtatttccttgtcacctcctgggctttctcggtgaggtgcatgaggatgtgatggaggctggagaagtgcaggtggaactgggcttccaggtccagctctcctgaggcactctcgtcctcgacttcctctgtctctgcggttccattctcttcgctgcctgccaccttggcctgccactcctcccgcggcagcagcccatggtccacatccacacagatggccttgagcatggtgaagtaggtgtagagatcaggggcctcagcctgggcctggcccccaggcccactcagctgcacgtcccgcagaaggctggggatcatcaccacctgctccatgttgtgcacctcggctgcataccggtccatgacggtcagcaggcagttcttggggtaacgcttggttagcacctgcatggttgcttcctctgacacaatgagaccagcagactgcccccgcactatttctaggctctcggcagattgacaggatgccaatgcccagctgttgggtcaacacagccctgttttgggccaatcccagggctcaggccccagcatctgtatcaggtgatccatctgcccagagacagatctgccagccttctgcttgtca

SEQ ID NO: 201 - DNA, 1133 bp, Homo sapiens
  misc_feature: Incyte ID No: 242278.1c
cccacctcgggcgcaccgggcagccctgggacgctggcgctgcgcacccccaccacgcgctgggactcagcagccgctaccacccctactccaagagcccgcttcccacgcctggcgcccccgtgccggtgcccgccgccaccggaccgtactactccccctacgccctctacggacagagactgaccaccgcctcggcgctggggtatcagtgagggcggccgggagggcgagcgagggagaggagggagagggggaggggaggagtccagggagaggcgggatcacggcccaggctgctgacacccgcgcgtggggaggactcgggccacgaaaggaaagaaatgtataccgtatctatctacccgacagcagcgaccgagacccggtgggacactccccttctccccactttcacctccccacccaaactttataaaagttgaaaaaatatcatttgactttttatagaaaaaaaaaggaaaaaataattgagaaagtgttcatctgaggactgcatcggtggacactggtatttatttatgttagctccaagcggaccggtggttcaaaagtgcattatttagtttgagctctgtaggtaaaaaggaggtgggaaaaattttaaaacttgagggtaaaaatgtggaaaacaaaccctcccatcccttgtagattataaataaaagcaaaaccgccacagaactagaggtcttctctttaatgttactttaaaattgctatgattgtattgtacgttatttaatgtctgattgaaacacaaatttacatgcatgtttgttacaaaaaaaatgaaaaaaaaagtcacaatttgtcagctctgatttcaaattgcaattatttttaaggtgtataccatcgaagagaatgggtatttttttgtatgtattctggaagaaaacaacaaaaaaaaaagaaaaagaaaaaattctattccaaaacctcatttgccttattttgttctttaaaaggaacacttaactatttttaatttttaagtccacccgctgagaaggggacaaggtttacgtcatgtactaaaataatagacaatgtatcgctttaaagattaaaattccgtatatttgatgtattaaagggttttacttctt

SEQ ID NO: 202 - DNA, 3426 bp, Homo sapiens
  misc_feature: Incyte ID No: 113621.5
  unsure 1410, 1412: a, t, c, g, or other
agccccccggcccgccatgggcgccgcggcccgcaccctgcggctggcgctcggcctcctgctgctggcgacgctgcttcgcccggccgacgcctgcagctgctccccggtgcacccgcaacaggcgttttgcaatgcagatgtagtgatcagggccaaagcggtcagtgagaaggaagtggactctggaaacgacatttatggcaaccctatcaagaggatccagtatgagatcaagcagataaagatgttcaaagggcctgagaaggatatagagtttatctacacggccccctcctcggcagtgtgtggggtctcgctggacgttggaggaaagaaggaatatctcattgcaggaaaggccgagggggacggcaagatgcacatcaccctctgtgacttcatcgtgccctgggacaccctgagcaccacccagaagaagagcctgaaccacaggtaccagatgggctgcgagtgcaagatcacgcgctgccccatgatcccgtgctacatctcctccccggacgagtgcctctggatggactgggtcacagagaagaacatcaacgggcaccaggccaagttcttcgcctgcatcaagagaagtgacggctcctgtgcgtggtaccgcggcgcggcgccccccaagcaggagtttctcgacatcgaggacccataagcaggcctccaacgcccctgtggccaactgcaaaaaaagcctccaagggtttcgactggtccagctctgacatcccttcctggaaacagcatgaataaaacactcatcccatgggtccaaattaatatgattctgctccccccttctccttttagacatggttgtgggtctggagggagacgtgggtccaaggtcctcatcccatcctccctctgccaggcactatgtgtctggggcttcgatccttgggtgcaggcagggctgggacacgcggcttccctcccagtccctgccttggcaccgtcacagatgccaagcaggcagcacttagggatctcccagctgggttagggcagggcctggaaatgtgcattttgcagaaacttttgagggtcgttgcaagactgtgtagcaggcctaccaggtccctttcatcttgagagggacatggcccttgttttctgcagcttccacgcctctgcactccctgcccctggcaagtgctcccatcgccccggtgcccaccatgagctcccagcacctgactccccccacatccaagggcagcctggaaccagtggctagttcttgaaggagccccatcaatcctattaatcctcagaattccagtgggagcctccctctgagccttgtagaaatgggagcgagaaaccccagctgagctgcgttccagcctcagctgagtctttttggtctgcacccaccccccnancctgctccccgcccacatgctccccagcttgcaggaggaatcggtgaggtcctgtcctgaggctgctgtccggggccggtggctgccctcaaggtcccttccctagctgctgcggttgccattgcttcttgcctgttctggcatcaggcacctggattgagttgcacagctttgctttatccgggcttgtgtgcagggcccggctgggctccccatctgcacatcctgaggacagaaaaagctgggtcttgctgtgccctcccaggcttagtgttccctccctcaaagactgacagccatcgttctgcacggggctttctgcatgtgacgccagctaagcatagtaagaagtccagcctaggaagggaaggattttggaggtaggtggctttggtgacacactcacttctttctcagcctccaggacactatggcctgttttaagagacatcttatttttctaaaggtgaattctcagatgataggtgaacctgagttgcagatataccaacttctgcttgtatttcttaaatgacaaagattacctagctaagaaacttcctagggaactagggaacctatgtgttccctcagtgtggtttcctgaagccagtgatatgggggttaggataggaagaactttctcggtaatgataaggagaatctcttgtttcctcccacctgtgttgtaaagataaactgacgatatacaggcacattatgtaaacatacacacgcaatgaaaccgaagcttggcggcctgggcgtggtcttgcaaaatgcttccaaagccaccttagcctgttctattcagcggcaaccccaaagcacctgttaagactcctgacccccaagtggcatgcagcccccatgcccaccgggacctggtcagcacagatcttgatgacttccctttctagggcagactgggagggtatccaggaatcggcccctgccccacgggcgttttcatgctgtacagtgacctaaagttggtaagatgtcataatggaccagtccatgtgatttcagtatatacaactccaccagacccctccaacccatataacaccccacccctgttcgcttcctgtatggtgatatcatatgtaacatttactcctgtttctgctgattgtttttttaatgttttggtttgtttttgacatcagctgtaatcattcctgtgctgtgttttttattacccttggtaggtattagacttgcactttttttaaaaaaaggtttctgcatcgtggaagcatttgacccagagtggaacgcgtggcctatgcaggtggattccttcaggtctttcctttggttctttgagcatctttgctttcattcgtctcccgtctttggttctccagttcaaattattgcaaagtaaaggatctttgagtaggttcggtctgaaaggtgtggcctttatatttgatccacacacgttggtcttttaaccgtgctgagcagaaaacaaaacaggttaagaagagccgggtggcagctgacagaggaagccgctcaaataccttcacaataaatagtggcaatatatatatagtttaagaaggctctccatttggcatcgtttaatttatatgttatgttctaagcacagctctcttctcctattttcatcctgcaagcaactcaaaatatttaaaataaagtttacattgtagttattttcaaatctttgcttgataagtattaagaaatattggacttgctgccgtaatttaaagctctgttgattttgtttccgtttggatttttgggggaggggagcactgtgtttatgctggaatatgaagtctgagaccttccggtgctgggaacacacaagagttgttgaaagttgacaagcagactgcgcatgtctctgatgctttgtatcattcttgagcaatcgctcggtccgtggacaataaacagtattatcaaagaatgatacaaagcatcagagacatgcgcagtctgcttgtcaactttcaacaactcttgtgtg

SEQ ID NO: 203 - DNA, 5688 bp, Homo sapiens
  misc_feature: Incyte ID No: 401532.2
  unsure 5185-5252: a, t, c, g, or other
cagaatggtagataattcctgttccactttctttgatgaaacaagtaaagaagaaacaacacaatcatattaatagaagagtcttcgttccagacgcagtccaggaatcatgctggagaagttctgcaactctactttttggaattcctcattcctggacagtccggaggcagacctgccactttgttttgagcaaactgttctggtgtggattcccttgggcttcctatggctcctggccccctggcagcttctccacgtgtataaatccaggaccaagagatcctctaccaccaaactctatcttgctaagcaggtattcgttggttttcttcttattctagcagccatagagctggcccttgtactcacagaagactctggacaagccacagtccctgctgttcgatataccaatccaagcctctacctaggcacatggctcctggttttgctgatccaatacagcagacaatggtgtgtacagaaaaactcctggttcctgtccctattctggattctctcgatactctgtggcactttccaatttcagactctgatccggacactcttacagggtgacaattctaatctagcctactcctgcctgttcttcatctcctacggattccagatcctgatcctgatcttttcagcattttcagaaaataatgagtcatcaaataatccatcatccatagcttcattcctgagtagcattacctacagctggtatgacagcatcattctgaaaggctacaagcgtcctctgacactcgaggatgtctgggaagttgatgaagagatgaaaaccaagacattagtgagcaagtttgaaacgcacatgaagagagagctgcagaaagccaggcgggcactccagagacggcaggagaagagctcccagcagaactctggagccaggctgcctggcttgaacaagaatcagagtcaaagccaagatgcccttgtcctggaagatgttgaaaagaaaaaaaagaagtctgggaccaaaaaagatgttccaaaatcctggttgatgaaggctctgttcaaaactttctacatggtgctcctgaaatcattcctactgaagctagtgaatgacatcttcacgtttgtgagtcctcagctgctgaaattgctgatctcctttgcaagtgaccgtgacacatatttgtggattggatatctctgtgcaatcctcttattcactgcggctctcattcagtctttctgccttcagtgttatttccaactgtgcttcaagctgggtgtaaaagtacggacagctatcatggcttctgtatataagaaggcattgaccctatccaacttggccaggaaggagtacaccgttggagaaacagtgaacctgatgtctgtggatgcccagaagctcatggatgtgaccaacttcatgcacatgctgtggtcaagtgttctacagattgtcttatctatcttcttcctatggagagagttgggaccctcagtcttagcaggtgttggggtgatggtgcttgtaatcccaattaatgcgatactgtccaccaagagtaagaccattcaggtcaaaaatatgaagaataaagacaaacgtttaaagatcatgaatgagattcttagtggaatcaagatcctgaaatattttgcctgggaaccttcattcagagaccaagtacaaaacctccggaagaaagagctcaagaacctgctggcctttagtcaactacagtgtgtagtaatattcgtcttccagttaactccagtcctggtatctgtggtcacattttctgtttatgtcctggtggatagcaacaatattttggatgcacaaaaggccttcacctccattaccctcttcaatatcctgcgctttcccctgagcatgcttcccatgatgatctcctccatgctccaggccagtgtttccacagagcggctagagaagtacttgggaggggatgacttggacacatctgccattcgacatgactgcaattttgacaaagccatgcagttttctgaggcctcctttacctgggaacatgattcggaagccacagtccgagatgtgaacctggacattatggcaggccaacttgtggctgtgataggccctgtcggctctgggaaatcctccttgatatcagccatgctgggagaaatggaaaatgtccacgggcacatcaccatcaagggcaccactgcctatgtcccacagcagtcctggattcagaatggcaccataaaggacaacatcctttttggaacagagtttaatgaaaagaggtaccagcaagtactggaggcctgtgctctcctcccagacttggaaatgctgcctggaggagatttggctgagattggagagaagggtataaatcttagtgggggtcagaagcagcggatcagcctggccagagctacctaccaaaatttagacatctatcttctagatgaccccctgtctgcagtggatgctcatgtaggaaaacatatttttaataaggtcttgggccccaatggcctgttgaaaggcaagactcgactcttggttacacatagcatgcactttcttcctcaagtggatgagattgtagttctggggaatggaacaattgtagagaaaggatcctacagtgctctcctggccaaaaaaggagagtttgctaagaatctgaagacatttctaagacatacaggccctgaagaggaagccacagtccatgatggcagtgaagaagaagacgatgactatgggctgatatccagtgtggaagagatccccgaagatgcagcctccataaccatgagaagagagaacagctttcgtcgaacacttagccgcagttctaggtccaatggcaggcatctgaagtccctgagaaactccttgaaaactcggaatgtgaatagcctgaaggaagacgaagaactagtgaaaggacaaaaactaattaagaaggaattcatagaaactggaaaggtgaagttctccatctacctggagtacctacaagcaataggattgttttcgatattcttcatcatccttgcgtttgtgatgaattctgtggcttttattggatccaacctctggctcagtgcttggaccagtgactctaaaatcttcaatagcaccgactatccagcatctcagagggacatgagagttggagtctacggagctctgggattagcccaaggtatatttgtgttcatagcacatttctggagtgcctttggtttcgtccatgcatcaaatatcttgcacaagcaactgctgaacaatatccttcgagcacctatgagattttttgacacaacacccacaggccggattgtgaacaggtttgccggcgatatttccacagtggatgacaccctgcctcagtccttgcgcagctggattacatgcttcctggggataatcagcacccttgtcatgatctgcatggccactcctgtcttcaccatcatcgtcattcctcttggcattatttatgtatctgttcagatgttttatgtgtctacctcccgccagctgaggcgtctggactctgtcaccaggtccccaatctactctcacttcagcgagaccgtatcaggtttgccagttatccgtgcctttgagcaccagcagcgatttctgaaacacaatgaggagaggattgacaccaaccagaaatgtgtcttttcctggatcacctccaacaggtggcttgcaattcgcctggagctggttgggaacctgactgtcttcttttcagccttgatgatggttatttatagagataccctaagtggggacactgttggctttgttctgtccaatgcactcaatatcacacaaaccctgaactggctggtgaggatgacatcagaaatagagaccaacattgtggctgttgagcgaataactgagtacacaaaagtggaaaatgaggcaccctgggtgactgataagaggcctccgccagattggcccagcaaaggcaagatccagtttaacaactaccaagtgcggtaccgacctgagctggatctggtcctcagagggatcacttgtgacatcggtagcatggagaagattggtgtggtgggcaggacaggagctggaaagtcatccctcacaaactgcctcttcagaatcttagaggctgccggtggtcagattatcattgatggagtagatattgcttccattgggctccacgacctccgagagaagctgaccatcatcccccaggaccccatcctgttctctggaagcctgaggatgaatctcgaccctttcaacaactactcagatgaggagatttggaaggccttggagctggctcacctcaagtcttttgtggccagcctgcaacttgggttatcccacgaagtgacagaggctggtggcaacctgagcataggccagaggcagctgctgtgcctgggcagggctctgcttcggaaatccaagatcctggtcctggatgaggccactgctgcggtggatctagagacagacaacctcattcagacgaccatccaaaacgagttcgcccactgcacagtgatcaccatcgcccacaggctgcacaccatcatggacagtgacaaggtaatggtcctagacaacgggaagattatagagtgcggcagccctgaagaactgctacaaatccctggacccttttactttatggctaaggaagctggcattgagaatgtgaacagcacaaaattctagcagaaggccccatgggttagaaaaggactataagaataatttcttatttaattttattttttataaaatacagaatacatacaaaagtgtgtataaaatgtacgttttaaaaaaggataagtgaacacccatgaacctactacccaggttaagaaaataaatgtcaccaggtacttgagaaacccctcgattgtctacctcgatcgtacttccttgctacccacccctcccagggacaaccactgtcctgaatttcacgataattattcctttgcctttcatttctgttttatcacctttgtatgtatctttaaacaacatatacccttttttacttatgtaaatggactgactcatactgcatacatcttctatgacttgattcttttgttcaatattatatctgagattcatccatggtgatgcaaataggtgcannnnnnnnnnnnnnnnnnnnnnnnnnnnnnnnnnnnnnnnnnnnnnnnnnnnnnnnnnnnnnnnnnnnggggatcattagcattattctcaggtttttaaaaattataagcagtactactatggacattctggtctacatctcctggcacatatgtaagagtttctctagggtataacctaggaatggagggtatgaacatgtttacatgcacaaactagctgatgccaaactggtaatgccaactgaaaacattgctgtcaatctgatgaatatgaattgatgtatcaatgagaatttcatttgcatttccctagtatctattggggatgaatatattttcatgtttctggggcatttgcatttccacttgttttttaaatattgtgtctgataattccaatgtctggattctttgtttatctgttgtttctgttggtttttactcatggtattttatttccttgtatgtcttgtgaatttttattataagcttgttctcctt

SEQ ID NO: 204 - DNA, 628 bp, Homo sapiens
  misc_feature: Incyte ID No: 006985.1c
ctcttctactgacagcagacttctcatcagcaaaaaaaaagatgtgtggaaacaggaaagaaataccttcaaagcactgaagggaaaaaaaaaaaactggtcacccaggaattccacatttggctgcgttgtcatccaagaatagaggacaacaagagtgtcacaattttcaggaacgtgcagaaagttgagaggcagcaatccagacactagctggaaagaatacaaaaagtctgcccaaggaaatagacatgaacctggaaggaaggagagggctacaggacacaattttgagctaagacattggtgcaaatatgttaggtgtaagaagccatggcctggggccagtgagtgttagcaccctgggaaaaatggagaaggggagatggttcgccactgtctaacaccacactgcatttcatttaaaaacaccatcagttgttaagatatactcttattgtatgtaacattaagaaaaaataaatttccaaaataaagtgtctaataggaggccccacataaagctggggcacattagtataacagcaagcaagacatgaacccaccacgcagaaaggaggagcaaatatcttgaccttggcatccagtggacagagaggaaaaaaaa

SEQ ID NO: 205 - DNA, 506 bp, Homo sapiens
  misc_feature: Incyte ID No: 351209.14
  unsure 15, 438, 441, 493, 496: a, t, c, g, or other
gaggaaggggcggantgctttgcggccggccgcggacagtcagccgactacagagaagggtaatcgggtgtccccggcgccgcccggggccctgagggctggctagggtccaggccgggggggacgggacagacgaaccagccccgtgtaggaagcgcgacaatgccccgctacggagcgtcactccgccagagctgccccaggtccggccgggagcagggacaagacgggaccgccggagcccccggactcctttggatgggcctggtgctggcgctggcgctggcgctggcgctggctctgtctgactctcgggttctctgggctccggcagaggctcaccctctttctccccaaggccatcctgccaggttacatcgcatagtgccccggctccgagatgtctttgggtgggggaactcacctgcccaatctgcnaangtctattcaccgccatcaactcgggctgaagaaggaacccaatgtggttcgngtnggctccgtgg

SEQ ID NO: 206 - DNA, 2485 bp, Homo sapiens
  misc_feature: Incyte ID No: 351209.16
tcagaggaagaggaaggggcggactgctttgcggccggccgcggagcagtcagccgactacagagaagggtaatcgggtgtccccggcgccgcccggggccctgagggctggctagggtccaggccgggggggacgggacagacgaaccagccccgtgtaggaagcgcgacaatgccccgctacggagcgtcactccgccagagctgccccaggtccggccgggagcagggacaagacgggaccgccggagcccccggactcctttggatgggcctggcgctggcgctggcgctggcgctggcgctggcgctggcgctggcgctggctctgtctgactctcgggttctctgggctccggcagaggctcaccctctttctccccaaggccatcctgccaggttacatcgcatagtgccccggctccgagatgtctttgggtgggggaacctcacctgcccaatctgcaaaggtctattcaccgccatcaacctcgggctgaagaaggaacccaatgtggctcgcgtgggctccgtggccatcaagctgtgcaatctgctgaagatagcaccacctgccgtgtgccaatccattgtccacctctttgaggatgacatggtggaggtgtggagacgctcagtgctgagcccatctgaggcctgtggcctgctcctgggctccacctgtgggcactgggacattttctcatcttggaacatctctttgcctactgtgccgaagccgccccccaaaccccctagccccccagccccaggtgcccctgtcagccgcatcctcttcctcactgacctgcactgggatcatgactacctggaggggcacggaccctgactgtgcagacccactgtgctgccgccggggttctggcctgccgcccgcatcccggccaggtgccggatactggggcgaatacagcaagtgtgacctgcccctgaggaccctggagagcctgttgagtgggctgggcccagccggcccttttgatatggtgtactggacaggagacatccccgcacatgatgtctggcaccagactcgtcaggaccaactgcgggccctgaccaccgtcacagcacttgtgaggaagttcctggggccagtgccagtgtaccctgctgtgggtaaccatgaaagcacacctgtcaatagcttccctccccccttcattgagggcaaccactcctcccgctggctctatgaagcgatggccaaggcttgggagccctggctgcctgccgaagccctgcgcaccctcagaattggggggttctatgctctttccccataccccggtctccgcctcatctctctcaatatgaatttttgttcccgtgagaacttctggctcttgatcaactccacggatcccgcaggacagctccagtggctggtgggggagcttcaggctgctgaggatcgaggagacaaagtgcatataattggccacattcccccagggcactgtctgaagagctggagctggaattattaccgaattgtagccaggtatgagaacaccctggctgctcagttctttggccacactcatgtggatgaatttgaggtcttctatgatgaagagactctgagccggccgctggctgtagccttcctggcacccagtgcaactacctacatcggccttaatcctggttaccgtgtgtaccaaatagatggaaactactccaggagctctcacgtggtcctggaccatgagacctacatcctgaatctgacccaggcaaacataccgggagccataccgcactggcagcttctctacagggctcgagaaacctatgggctgcccaacacactgcctaccgcctggcacaacctggtatatcgcatgcggggcgacatgcaacttttccagaccttctggtttctctaccataagggccacccaccctcggagccctgtggcacgccctgccgtctggctactctttgtgcccagctctctgcccgtgctgacagccctgctctgtgccgccacctgatgccagatgggagcctcccagaggcccagagcctgtggccaaggccactgttttgctagggccccagggcccacatttgggaaagttcttgatgtaggaaagggtgaaaaagcccaaatgctgctgtggttcaaccaggcaagatcatccggtgaaagaaccagtccctgggccccaaggatgccggggaaacaggaccttctcctttcctggagctggtttagctggatatgggagggggtttggctgcctgtgcccaggagctagactgccttgaggctgctgtcctttcacagccatggagtagaggcctaagttgacactgccctgggcagacaagacaggagctgtcgccccaggcctgtgctgcccagccaggaaccctgtactgctgctgcgacctgatgctgccagtctgttaaaataaagataagagacttggactccaaaaaaaaaaaaaagg

SEQ ID NO: 207 - DNA, 2353 bp, Homo sapiens
  misc_feature: Incyte ID No: 475819.14
agcctgggtaccaaatcatgttacctccttccttggtggccgcagctgtggccggagaggtgggagtcggagcgaggccctctcgggggagcagggtgaacgccggccactctaggatcctcactcggggagaggaggcatagctcgcggtgtcacctccagccgcaacgtactccgggtcggccttgcgctcggggcctgagaggggcggcggcggggtcaggggccgcacaaagaatgaaccagcagtggaagagaaaatactgtaagctggctgactgctggtgaagaaaatgctttatttttgtggcaggcatctgtgggatctgtaatagaaatatattggagtaattcaagattctgtggttggcccttttgactgctctctctacaggtttaatttgggcatttactcattttcatggctccaaggaccatgtatgtgttggggatcttcaatattcatgttattttctcctttggtcttatatgattgttacctttatgaagctttagtgattacaaagcactttttttgtccatttttacctgagctttgtaaactctgatttgcaggatggctggctgtggtgaaattgatcattcaataaacatgcttcctacaaacaggaaagcgaacgagtcctgttctaatactgcaccttctttaaccgtccctgaatgtgccatttgtctgcaaacatgtgttcatccagtcagtctgccctgtaagcacgttttctgctatctatgtgtaaaaggagcttcatggcttggaaagcggtgtgctctttgtcgacaagaaattcccgaggatttccttgacaagccaaccttgttggtcaccagaagaactcaaggcagcaagtagaggaaatggtgaatatgcatggtattatgaaggaagaaatgggtggtggcagtacgatgagcgcactagtagagagctggaagatgctttttccaaaggtaaaaagaacactgaaatgttaattgctggctttctgtatgtcgctgatcttgaaaacatggttcaatataggagaaatgaacatggacgtcgcaggaagattaagcgagatataatagatataccaaagaagggagtagctggacttaggctagactgtgatgctaataccgtaaacctagcaagagagagctctgctgacggagcggacagtgtatcagcacagagtggagcttctgttcagcccctagtgtcttctgtaaggcccctaacatcagtagatggtcagttaacaagccctgcaacaccatcccctgatgcaagcacttctctggaagactcttttgctcatttacaactcagtggagacaacacagctgaaaggagtcataggggagaaggagaagaagatcatgaatcaccatcttcaggcagggtaccagcaccagacacctccattgaagaaactgaatcagatgccagtagtgatagtgaggatgtatctgcagttgttgcacagcactccttgacccaacagagacttttggtttctaatgcaaaccagacagtacccgatcgatcagatcgatcgggaactgatcgatcagtagcagggggtggaacagtgagtgtcagtgtcagatctagaaggcctgatggacagtgcacagtaactgaagtttaaataaaaatgtcttcagctccatgctcaaggttgaaagggttacctgtaaatttctgcccacataacattatactcatccctagtagtgcattttgggagttggggtgggaaggggtatgggaaggatagactcataattaaaatgtctaacatgtctctgttgagaaatttatttaatgtaaggaacttgggtgttaatagttgagagctgtttagtaataacccagttttcttgaggtctgtttactttatactttttaaaaacttctgtagttcttttggccagtgtgtttgtattatctgtgcattaatggtcctcatctgactcctgcattgtgtcttatttttctgcatggattggcataagaccattactaaaatttggcacctgtgagatgtttgatattatgaacaggaaacataatttaatgtatgaatagatgtgaatttgggatttcaaaatagatgaataacaactattttatagtaaagttattgaaatggaaatgaaaacagccagtaacttatgtttcagaatgtttgtaacacacttcatggtgttcccataggctttgctgtctagtcttatagtttgaggtttttttggtctgcatttttctttttgattacaaaatttataatttaataaatactagagtttatccaaaaaaaaaaaaaagcggccgtcgcgatctaga

SEQ ID NO: 208 - DNA, 2546 bp, Homo sapiens
  misc_feature: Incyte ID No: 241384.3
gttctgctcgcgatctagaactagtccgcgaagcggccggcctgggcgccgactgcagagccgggaggctggtggtcatgccggggttcctggttcgcatcctccctctgctgctggttctgctgcttctgggccctacgcgcggcttgcgcaatgccacccagaggatgtttgaaattgactatagccgggactccttcctcaaggatggccagccatttcgctacatctcaggaagcattcactactcccgtgtgccccgcttctactggaaggaccggctgctgaagatgaagatggctgggctgaacgccatccagacgtatgtgccctggaactttcatgagccctggccaggacagtaccagttttctgaggaccatgatgtggaatattttcttcggctggctcatgagctgggactgctggttatcctgaggcccgggccctacatctgtgcagagtgggaaatgggaggattacctgcttggctgctagagaaagagtctattcttctccgctcctccgacccagattacctggcagctgtggacaagtggttgggagtccttctgcccaagatgaagcctctcctctatcagaatggagggccagttataacagtgcaggttgaaaatgaatatggcagctactttgcctgtgattttgactacctgcgcttcctgcagaagcgctttcgccaccatctgggggatgatgtggttctgtttaccactgatggagcacataaaacattcctgaaatgtggggccctgcagggcctctacaccacggtggactttggaacaggcagcaacatcacagatgctttcctaagccagaggaagtgtgagcccaaaggacccttgatcaattctgaattctatactggctggctagatcactggggccaacctcactccacaatcaagaccgaagcagtggcttcctccctctatgatatacttgcccgtggggcgagtgtgaacttgtacatgtttataggtgggaccaattttgcctattggaatggggccaactcaccctatgcagcacagcccaccagctacgactatgatgccccactgagtgaggctggggacctcactgagaagtattttgctctgcgaaacatcatccagaagtttgaaaaagtaccagaaggtcctatccctccatctacaccaaagtttgcatatggaaaggtcactttggaaaagttaaagacagtgggagcagctctggacattctgtgtccctctgggcccatcaaaagcctttatcccttgacatttatccaggtgaaacagcattatgggtttgtgctgtaccggacaacacttcctcaagattgcagcaacccagcacctctctcttcacccctcaatggagtccacgatcgagcatatgttgctgtggatgggatcccccagggagtccttgagcgaaacaatgtgatcactctgaacataacagggaaagctggagccactctggaccttctggtagagaacatgggacgtgtgaactatggtgcatatatcaacgattttaagggtttggtttctaacctgactctcagttccaatatcctcacggactggacgatctttccactggacactgaggatgcagtgcgcagccacctggggggctggggacaccgtgacagtggccaccatgatgaagcctgggcccacaactcatccaactacacgctcccggccttttatatggggaacttctccattcccagtgggatcccagacttgccccaggacacctttatccagtttcctggatggaccaagggccaggtctggattaatggctttaaccttggccgctattggccagcccggggccctcagttgaccttgtttgtgccccagcacatcctgatgacctcggccccaaacaccatcaccgtgctggaactggagtgggcaccctgcagcagtgatgatccagaactatgtgctgtgacgttcgtggacaggccagttattggctcatctgtgacctacgatcatccctccaaacctgttgaaaaaagactcatgcccccacccccgcaaaaaaacaaagattcatggctggaccatgtatgatgatgaaagcctgtgtctttgagggattctaccctgaacatacctcacagatcctccctgtcatgccacatttcactgattggaatgtggaaatggaaaaggaatttaggatgtgcattttcacctgaggtttccctgcatccctgcagtgccaaagccccaccttcagggaccacctggaatgtgtgaggggctgacagcacagtaacgtgcatacatatctgcagggctggaatggaagctttaaaggtggtagtgatttttattttggaagaatcatgttacctttttgttaaataaaatttgtactcaaatgatgatgtcactgtttttaatgtgcaggtattgaattatatggtctgacttaaatcataactagacttgagtgggctgaataaaccacttcactaacttgaagttcaaaaggatgaaaaa

SEQ ID NO: 209 - DNA, 383 bp, Homo sapiens
  misc_feature: Incyte ID No: 003428.1
  unsure 35: a, t, c, g, or other
gttgtcttagcataattaatagtgctcttttttgntctcagaattgcctggatggattatagatatatggtcaccctaggttttgattatattaagttagtatcacaaccagggcccaaggaatgaccatatcctgccttgccactcacccctctcctattaactccctcctggagctaaatgcacaaggagcagacagcaaaatggaaatcaacatactgctttgtattagcttatttcagagatctttggaacagctaggttgtggctcatggcttaggtttgtcctctgcctcctacatccagatcttaccaccatctggcttccaagcctgagacagggaagaacgtctcattgggcctgcttggaaagagtaggccct

SEQ ID NO: 210 - DNA, 3944 bp, Homo sapiens
  misc_feature: Incyte ID No: 244200.1
tttatatatatatatttttaaattttgcatttgacttaaagtgccatgagaaaatttgcatactgcaaggtggtcctagccacctccttgatttgggtactcttggatatgttcctgctgctttacttcagtgaatgcaacaaatgtgatgaaaaaaaggagagaggacttcctgctggagatgttctagagccagtacaaaagcctcatgaaggtcctggagaaatggggaaaccagtcgtcattcctaaagaggatcaagaaaagatgaaagagatgtttaaaatcaatcagttcaatttaatggcaagtgagatgattgcactcaacagatctttaccagatgttaggttagaagggtgtaaaacaaaggtgtatccagataatcttcctacaacaagtgtggtgattgttttccacaatgaggcttggagcacacttctgcgaactgtccatagtgtcattaatcgctcaccaagacacatgatagaagaaattgttctagtagatgatgccagtgaaagagactttttgaaaaggcctttagagagttatgtgaaaaaactaaaagtaccagttcatgtaattcgaatggaacaacgttctggattgatcagagctagattaaaaggagctgctgtgtctaaaggccaagtgatcaccttcctggatgcccattgtgagtgtacagtgggatggctggagcctctcttggccaggatcaaacatgacaggagaacagtggtgtgtcccatcatcgatgtgatcagtgatgatacttttgagtacatggcaggctctgatatgacctatggtgggttcaactggaagctcaattttcgctggtatcctgttccccaaagagaaatggacagaaggaaaggtgatcggactcttcctgtcaggacacctaccatggcaggaggccttttttcaatagacagagattactttcaggaaattggaacatatgatgctggaatggatatttggggaggagaaaacctagaaatttcctttaggatttggcagtgtggaggaactttggaaattgttacatgctcacatgttggacatgtgtttcggaaagctacaccttacacgtttccaggaggcacagggcagattatcaataaaaataacagacgacttgcagaagtgtggatggatgaattcaagaatttcttctatataatttctccaggtgttacaaaggtagattatggagatatatcgtcaagagttggtctaagacacaaactacaatgcaaacctttttcctggtacctagagaatatatatcctgattctcaaattccacgtcactatttctcattgggagagatacgaaatgtggaaacgaatcagtgtctagataacatggctagaaaagagaatgaaaaagttggaatttttaattgccatggtatggggggtaatcaggttttctcttatactgccaacaaagaaattagaacagatgacctttgcttggatgtttccaaacttaatggcccagttacaatgctcaaatgccaccacctaaaaggcaaccaactctgggagtatgacccagtgaaattaaccctgcagcatgtgaacagtaatcagtgcctggataaagccacagaagaggatagccaggtgcccagcattagagactgcaatggaagtcggtcccagcagtggcttcttcgaaacgtcaccctgccagaaatattctgagaccaaatttacaaaaaaacgaaaaaaataaggattgactgggctacctcagcatacatttctgccacattcttaagtagcaaaaaaggaaaagtgctttcctcctctgcaggatgtaaggtttatcagccattaaaacttagacttctctagcttttcactagctgtgaaccagccttcctgtccatggacgtgaaactgcatagtaatgagactgtgcacactgatgtttacaagattgaaagagtctttctccgaaaatcatggtaaagaatactgagacaatgaaaaaaaatcaacaaaatatgctttctggagaactgtaccttttatggtttgcttgcacatcagtagtttctgctgaacgtgctgtcataatgaagagatttccaagattttttttcctgattagaactggtagccagtatattaaatattgatataaaaataaaagaactggaaccagattcagaatcatgaaaacaacatttttacaacaacaaaaaaactatattaaacagggtttaaaggaaattaaaacagaactatgagaagtacaatttgttatagtatagtatcaaatttctatatagattttatacctcagtggggaaaaataactgattccaatgacattcattttgttttcatctgtgatagtcatggatgcttttattttccttggggtgctgaaattgagctgaaaaaaaaaggctctttgaatatagttttaatttctctctacagttttttttgtttggtttgtgggctgttggaattgtaatttttaattgccttctaaaaaatggaaatttaacaatgtctgatctcagctgaacaaattagatgtttcagttgctcttgggtcaactggcttacagatttacatgtgcacacacacacaaatttcttatcacattttcgacttcttcacttgacctaactgattatgcgaaatacccaagattcatgctactgtaccacagatttgttttcacagcaataaatcttcagttctttgtttatgattccacttaacaaaaggcctgcagaagtgatttattatttgggtatttggagataatacatttgatggttttttggaaaacctttttcactccatactcagatatgcttcattgtcaaatgcatatttagattagattattgaattgtaatgtttatctgctgctttttttaaataaaatttgactgaaaatgtttaattgggcattttttaatgacttagccaaagaagtgcagctattattccatattaataggcttgcatttcttttcctaaatcttatttaggctaaatcagttttatttttctctgattttttttaataccacagaatcacctgagtgtcaattgaaagttgtcaattaaaaggtaaccttttaatctcgtaggaggaatctcattaagacatttttcctgatatgtagagcagtctgttggcaaaaatgcatatattttctttcatatttgtaaaattatatttaatggaattcttttctttgattatcaaggactttcactgcaggcagtgctatttcttgtgcctaagaatgtttccaaaagtcgcatcgctaatgatatttgccaagttgagtgtacacaaagtttctcatatcctgttcaagttaatcaacatcaagcacatggggatgctttagggtgagtctatagtacaaaatgcataaaccatgtccccaggaaatttgaaaggaagcaggtgctgaatggaatttttttccttttccatgagctgtgttaattctatctccagtaggcctaatgcttgaataagcaagatgtctaatcaataaattattttcatgctcagaatttcaggtttttgtactccagcatagcttggtcttatttcttactgtatgaaagcttaacagcaatgtgatttaaggttttgttttaaatgggagatgtaagtgatttaattcatgggtacttttagaacctgatagataatcccattgcctttatttttctaattaaagaattcctaaatactttgaaaatacaaaatattcctgaatagttgtgccttacattggttttatttgaagttagagtggatccctgtttatcataattacttgtaattaggcagatgcttatcactctattataaatcaaattgggaagaaaagaatgaaaaagaaaacaatggctgggtactggctcatacctg

SEQ ID NO: 211 - DNA, 740 bp, Homo sapiens
  misc_feature: Incyte ID No: 412484.3
  unsure 252: a, t, c, g, or other
cgggtctgcgcggacgggcctccttacctcatttgtcctcgcccctccccgtccctctacgcgttttggtccctgtttggtgctttctgtttgcagctacggcagtgagtatgtatgtgacggaccccgagtcacccgcggcctgggacccctgcctaccctccgtctcgccagccgagctgtggaactagcgcgtgccccctcgccgacctcggcgtctccggtccgcccctcacttgtggtggggcgcanttcctggtccctcagctgcgcgccgccccacgcggccgggctgcgggtctagggggtccgcatctccctggctttccaagggctaaggtcgtgattctagggcggctgggcgtccagggcctcggtgggggtggcgtgtctgcccttttatctccccgcaaggcccccagtcttctagggaagccagtcagtgaagcgcggaggtccgggcgcgccgagagagagtccagtctttgaggaccgagtagtcctgggccacctcccgcctctgctgtcagaagcagcagctgccgccgtggaatccaaaatttcgggagctgtgaccctttcctcatgtaaaacgagtagtcttggacgatctgggcataggaaccaatcagaaacaatcgcttcagcaatcaagaccattgttcatcatggaggaacccatggatacctctgagcctctatctgcattaccattcactgggcagcagtcttttgagcca

SEQ ID NO: 212 - DNA, 1665 bp, Homo sapiens
  misc_feature: Incyte ID No: 412484.8
  unsure 1187: a, t, c, g, or other
gtttggtgctttctgtttgcagctacggcaatctgggcataggaaccaatcagaaacaatcgcttcagcaatcaagaccattgttcatcatggaggaacccatggatacctctgagcctctatctgcattaccattcactgggcagcagtcttttgagccaagtggcaaatttggacagtatccatcgatgcagatgaaccacatccaggcactggggaagtggaggacatagaacagctcaatcagtgtttgatccaacacttccatctcattaagacaagtttgatttttctttgctttttatttcatggaatacatgagaatctcttaactgttggagtttccaaggaggcatacctcgtgacttcagttaatggaaagaacaaaactaaaatgctgtatggccaaagccacaaagggaaggatccgcaatttacattcttggagctatcatctgtactgtactgttgtgatctactgattggcattggcatagtagtaggggtcaagtgacagaatccgtgccagcagtctccaggttcagaagcaattcaagaccctgatgatagctctccagcaaccaacacatggtgattgtgccaacttgttgctcagttataatgcagggccagtgattggtttaagtgaagaccatggttgagatcatttgtctttggtctaatagaatttgagtctagtagaatttgagtctccagggaaagagctacttgaccaaattaaactagtagcaggtagagcatgaatgacagcatattataccatcaagatgttcttagagcagtgtatggatggatcgattgtactgccatcagttgtgactgacgttgtattcaaggagaaagagaaacttgtttagaaagcactttgaaagttttttgagtacgggggtgccctgtatcaccccgttatggttgaactttctccttcaaaattaccagacttggcagcagtggcaaattattgggctaaaagacttaatcagacatattctgggttcaaggctcctaatataatacctggtgcaaacattatacttccactcattcagatggttgcatcctgccaggcatccagtgggactgggaatatggacacttgaacattaaacatcctgaagaattttggaatgacaggttacaagtgaacataatcagttctctatatnaaaaaaaaaaaaaagatttgggcatagattgggctcacataatctttagagagattttttcatttttgtgaaagtacagaaattcttaactgcttatgaaatgctgattgttaaacagcatccacagctattttgtgttgtttccctgaccccaccctgaagaaaagaaaaattatggcatattgaaaacagcagtatgatgtaagagaaaagatcacaaattccttgagggtgggtcttttccatactcataagcctatttataatattcagagtaatttattgacacatattaatattccctcctatcccattaattgccaaatcatcaaacatttattgagcatctactctgtgtagggtgtaagcagtactggggacttacagtgataaaagacatagttttagccttaagtgatgtactgtttcactgaagagatggaatataagaagccaagtaatttatggaattctcttc

SEQ ID NO: 213 - DNA, 1419 bp, Homo sapiens
  misc_feature: Incyte ID No: 402187.16
gggtctcggccggcgctgacgcagccatggcggaggcggctttggaagccgtgcggagcgagttacgagaattcccggccgctgcaagggagctctgcgtgcctcttgctgtgccctacctggacaaacccccaactccgctccacttctaccgggactgggtctgccccaacaggccgtgcattatccgcaacgctctgcagcactggccggccctccagaagtggtccctcccctatttcagagccacagtgggctccacagaggtgagtgtggccgtgaccccagatggttacgcggatgccgtgagaggggatcgcttcatgatgccagctgagcgccgcctgcccctgagcttcgtgctggatgtgctggagggccgggcccagcaccctggagtcctctatgtgcagaagcagtgctccaacctgcccagcgagctgccccagctgctgcctgatctggaatcccatgtgccctgggcctccgaggccctgggaaagatgcccgatgctgtgaacttctggctgggggaggcggctgcagtgacttctttgcacaaggaccactatgagaacctctactgcgtggtctcaggagagaagcatttcctgttccatccgcccagcgaccggcccttcatcccctatgagctgtacacgccggcaacctaccagctaactgaagagggcacctttaaggtggtggatgaagaggccatggagaaggtgccctggatcccactggaccccttggcgccagacctagcacggtaccctagttacagtcaggcccaggcccttcgctgcacggtgcgggccggtgagatgctctatctgccggctctgtggttccaccacgtccagcagtcccagggctgcatcgcagtgaatttctggtatgacatggaatacgacctcaagtatagttacttccagctgctcgactccctcaccaaggcttcaggccttgactgatggagcactggtgaacacgaccaagcacgcctcgggggacggagccagcccctccctggccaggtcaattctcgagagagcctggagtgtgcatgctggctgctggccccgggtccagcatggcttgagatcagctttggaggatcttggaatgtggtcataaggactcaaggtgccaggcaggtctgggtgagggttctcaggaagttgccacacaggtgagcagagtggggatcaggtgcagcggcacctctccccagcgctgtgatgttgggcgagtcactgcgtctcgggcattggtgtcctgtcagtaaagagataataatggctgtacctcgcggggctgttgtgggcttggagatgatgtctatgaggaccagcatggagctggcacacaggacatgttgaataaaaggtagctgtgaaaaaaaaaaaaaagatt

SEQ ID NO: 214 - DNA, 1703 bp, Homo sapiens
  misc_feature: Incyte ID No: 903091.31
caggaaaccctggtactggcagcagccagcctctgctgtgcccacatgacccacaactctggcagcggacccggcacttccaacattattaaataataagaaagcggctcctactccaggctcaaacctccctgcagaccaatggacaccttctaagagttggcgagtcagtgactgaagcgcccgtccattccaagataaataggatttaccaatccttggatgaagtgcttgggaagtctttaagtgccataatcaactgccatttcaaagaatatagatggttttgaaaagttcatgctgtcccttcattgaattttagaatgattgaagatagtgggaaaagaggaaataccatggcagaaagaagacagctgtttgcagagatgagggctcaagatctggatcgcatccgactctccacctacagaacagcatgcaagcttaggtttgttcagaagaaatgcaatttgcacctggtggacatatggaatgtcatagaagcattgcgggaaaatgctctgaacaacctggacccaaacactgaactcaacgtgtcccgcttagaggctgtgctctccactattttttaccagctcaacaaacggatgccaaccactcaccaaatccatgtggagcagtccatcagcctcctccttaacttcctgcttgcaggcgtttgatccggaaggccatggtaaaatttcagtatttgctgtcaaaatggctttagccacattgtgtggagggaagatcatggacaaattaagatatattttctcaatgatttctgactccagtggggtgatggtttatggacgatatgaccaattccttcgggaagttctcaaactacccacggcagtttttgaaggtccttcatttggttacacagaacagtcagccagatcctgtttctcccaacagaaaaaagtcacgttaaatggtttcttggacacgcttatgtcagatcctcccccgcagtgtctggtctggttgcctcttctgcatcgactagcaaatgtggaaaatgtcttccatccggttgagtgttcctactgccacagtgagagtatgatgggatttcgctaccgatgccaacagtgtcacaattaccagctctgtcaggactgcttctggaggggacatgccggtggttctcatagcaaccagcaccaaatgaaagagtacacgtcatggaaatcacctgctaagaagctgactaatgcattaagcaagtccctgagctgtgcttccagccgtgaacctttgcaccccatgttcccagatcagcctgagaagccactcaacttggctcacatcgttgatacttggcctcccagacctgtaaccagcatgaacgacaccctgttctcccactctgttccctcctcaggaagtccttttattaccaggagctcggacggtgcttttggtggatgcgtctagatggataacatgacttcttctaccctaaaatattcctataatactttgagctgttctggttcctccagggtgcatggtacccattaacccaaaatatgattatttcccttttttcccattttcagtcattttggaatgttctctgtgaaccacagttgtgttgtttaaagctcacatttctttctgtcaccacagagattggcctacggtttctgttttgagggtgctgttcaataaagctgtgtacactaaaa

SEQ ID NO: 215 - DNA, 2905 bp, Homo sapiens
  misc_feature: Incyte ID No: 903091.33c
gttgtatttggattctccctatagtgagtcgtattaatttccagattgattttacactttccttttttacagaccatgggaatgaagggtaaaaatgtgtccagcattttccaaacattctttgttacacacaaacacacataatgaataatagaaaagagcatacagaagaaatgaaagatacgttgaaattggacaggttgtggttctaattgatccatggaaataatgtgaaacttttaaataatgctagtgagtgggatatattgtcatacatagcgtggtacatgcacttgaaattaaagctgcttttattttgcttctatttaatttaatttaatttaatttaatttgttttttttttgagtttgctgctccccctgctggctcttgagcctgaccacaggttcagacagctccagtttaggctataaagtcacaatgcccctatttccagaaaaaaaaaaaagtatgtaatgaccctctcgtctcccggagccgaaaggctctggtgctaaggaaaaagctgagagttactttttaaaaagagattactgtcaaccaacagtaaggattctgctttggggaagagccaaaaagatgggacgtgaatagtcagttatggagtacagtctttctctcacaaaattgagcacattttggtgagccatggggaacaaggctcaataattgtgtgatgaaaagggatttaattgcctgatttttataaaaagaggtttcacaggttttcagtaaaatgaaaccgaactgaatactcacagtgtgagtgggtgtagaggttagcttctgagtgctgtgggttttgggatgacatgaacctcagggtatctctagtgactgtggtatctctctgttaagagaagggtctgatcaacaacttgaaaagctaagactggtttgaaacttatacctctggggatctaaaatgtttccaataaatgacaattcgttcccttttctaaaagatgtcatagttcttcttttgatgtggatagtagtgatagttataaaaaatgctaaatttatatatctcaattcaagcactacattgaaaaagaagcaaattagtatgacttttttctctttccaaactgaagcatgaacatacattagagcaaaagcaatgagaaaaccgcaggtcggcaggcccctccactgttagttaagacctgcagtaggggacataacttactccctgcttcagttcttcttcctttagtagcttcatgagaccctccaactggaccattagctctctccggctctcctggagagcagacattctctgttccagctcatctttgcgctgtctgaggagccggagttctgccagcagggtggggttttgctgtgccttctctggcgtgggctgagaagcttgttcatgctctagccgaagtctctggatctcctgtaagatttctctgttcttgttttctagctcagcaatcagctgcctttgctgcttattcgcatcgatggtgaaagagatgtcaggagcacttctctgctgaggtggctgagacgaagaggactctgctgccagccttgccgcatacctggcaattagcctgtgttcttcatcaagccggtttgaactctcaagcatgctcctggtaataaaaggacttcctgaggagggaacagagtgggagaacagggtgtcgttcatgctggttacaggtctgggaggccaagtatcaacgatgtgagccaagttgagtggcttctcaggctgatctgggaacatggggtgcaaaggttcacggctggaagcacagctcagggacttgcttaatgcattagtcagcttcttagcaggtgatttccatgacgtgtactctttcatttggtgctggttgctatgagaaccaccggcatgtcccctccagaagcagtcctgacagagctggtaattgtgacactgttggcatcggtagcgaaatcccatcatactctcactgtggcagtaggaacactcaaccggatggaagacattttccacatttgctagtcgatgcagaagaggcaaccagaccagacactgcgggggaggatctgacataagcgtgtccaagaaaccatttaacgtgacttttttctgttgggagaaacaggatctggctgactgttctgtgtaaccaaatgaaggaccttcaaaaactgccgtgggtagtttgagaacttcccgaaggaattggtcatatcgtccataaaccatcaccccactggagtcagaaatcattgagaaaatatatcttaatttgtccatgatcttccctccacacaatgtggctaaagccattttgacagcaaatactgaaattttaccatggccttccggatcaaacgctgcaagcaggaaagttaaggaggaggctgatggactgctccacatggatttggtgagtggttggcatccgtttgttgagctggtaaaaaatagtggagagcacagcctctaagcgggacacgttgagttcagtgtttgggtccaggttgttcagagcattttcccgcaatgcttctatgacattccatatgtccaccaggtgcaaattgcatttcttctgaacaaacctaagcttgcatgctgttctgtaggtggagagtcggatgcgatccagatcttgagccctcatctctgcaaacagctgtcttctttctgccatggtatttcctcttttcccactatcttcaatcattctggttttgtagttaaatgcaccaacatgccccttaattcttcctctgaagtactacatatgctgaaaactatagtatttgaccttacacatttccaaacaaactccaaagtaacctttaacttcaataaaaagctgtgttcattcttccccttgtgctcaacacacagcaatctaat

SEQ ID NO: 216 - DNA, 2698 bp, Homo sapiens
  misc_feature: Incyte ID No: 903091.16
  unsure 518-561, 2210, 2234, 2266, 2288, 2292, 2297, 2309, 2314, 2318-2319: a, t, c, g, or other
attagattgctgtgtgttgagcacaaggggaagaatgaacacagctttttattgaagttaaaggttactttggagtttgtttggaaatgtgtaaggtcaaatactatagttttcagcatatgtagtacttcagaggaagaattaaggggcatgttggtgcatttaactacaaaaccagaatgattgaagatagtgggaaaagaggaaataccatggcagaaagaagacagctgtttgcagagatgagggctcaagatctggatcgcatccgactctccacctacagaacagcatgcaagcttaggtttgttcagaagaaatgcaatttgcacctggtggacatatggaatgtcatagaagcattgcgggaaaatgctctgaacaacctggacccaaacactgaactcaacgtgtcccgcttagaggctgtgctctccactattttttaccagctcaacaaacggatgccaaccactcaccaaatccatgtggagcagtccatcagcctcctccttaannnnnnnnnnnnnnnnnnnnnnnnnnnnnnnnnnnnnnnnnnnncagtatttgctgtcaaaatggctttagccacattgtgtggagggaagatcatggacaaattaagatatattttctcaatgatttctgactccagtggggtgatggtttatggacgatatgaccaattccttcgggaagttctcaaactacccacggcagtttttgaaggtccttcatttggttacacagaacagtcagccagatcctgtttctcccaacagaaaaaagtcacgttaaatggtttcttggacacgcttatgtcagatcctcccccgcagtgtctggtctggttgcctcttctgcatcgactagcaaatgtggaaaatgtcttccatccggttgagtgttcctactgccacagtgagagtatgatgggatttcgctaccgatgccaacagtgtcacaattaccagctctgtcaggactgcttctggaggggacatgccggtggttctcatagcaaccagcaccaaatgaaagagtacacgtcatggaaatcacctgctaagaagctgactaatgcattaagcaagtccctgagctgtgcttccagccgtaaacctttgcaccccatgttcccagatcagcctgagaagccactcaacttggctcacatcgtgcctcccagacctgtaaccagcatgaacgacaccctgttctcccactctgttccctcctcaggaagtccttttattaccaggagctctcctcccaaggacagtgaagtagagcagaacaaactgctggctagggctgctccagcttttctgaagggcaaagggatacagtacagcctgaatgtggcagacaggctagctgatgaacatgttctcatcgggttgtatgtcaacatgctccggaacaacccctcatgcatgcttgagagttcaaaccggcttgatgaagaacacaggctaattgccaggtatgcggcaaggctggcagcagagtcctcttcgtctcagccacctcagcagagaagtgctcctgacatctctttcaccatcgatgcgaataagcagcaaaggcagctgattgctgagctagaaaacaagaacagagaaatcttacaggagatccagagacttcggctagagcatgaacaagcttctcagcccacgccagagaaggcacagcaaaaccccaccctgctggcagaactccggctcctcagacagcgcaaagatgagctggaacagagaatgtctgctctccaggagagccggagagagctaatggtccagttggagggtctcatgaagctactaaaggaagaagaactgaagcagggagtaagttatgtcccctactgcaggtcttaactaacagtggagggggctgccgacctgcggttttctcattgctttggctctaatgtatgtccatgcttcagtttggaaagagaaaaaagtcatactaattgggttctttttcaatgtagtgcttgaattgagatatataaatttagcattttttataactatccactactatccacatcaaaagaagaactatgacatcttttagaaaagggaacgaattgtcatttattggaaacattttagatccccagaggtataagtttcaaaccagtcttagcttttcaagttgttgatcagacccttctcttaacagagagataccacagncactagagataccctgaggttcangtcatcccaaaacccacaggaactcagaaggntaacctctacaaccactcacantggngagtnttcagttcgggnttcantttnncttgaaaacctgtgaaacccctttttaaaaatcagcaattaaatccctttcacacacaattttggcctgtccccatggtcacaaatgtgctcaattttgtgagagaaagactgtactccataactgactattcacgtcccatctttttggctcttccccaaagcagaatccttactgttggttgacagtaatctctttttaaaaagtaactctcagctttttccttagcaccagagcctttcggctccgggagacgagagggtcattacatacttttttttttttctggaaataggggcattgtgactttatagcctaaactggagctgtctgaacctgtggtcaggctcaagagccagcagggggagcagcaaactcc

SEQ ID NO: 217 - DNA, 694 bp, Homo sapiens
  misc_feature: Incyte ID No: 228447.29c
gtcttgttcttggtatgtgtgctgcgtgagcagcttctcagcctcggtcagggtgtttggcatgtcctccgaggcgatcgctgtctgggtcctagagagccaggactggaagtcgtccaagtcccgtaggaactgctgcagcttgctggcctctcccagggaggcctctcggtttttcagggtggtcttcatctcctcccacacgtcgctgatctcggccagccgagacaggatggcctgggcctggtcggggtgctcggactccagcttctccgcctccttctgcaggtcactcagctttgcctcaatggccaccaagtcccgctccatgccggtcagcttgcgctgcagggccatgacgccagccaggtcattgcccaggtcctgggtggactcgatgaccttggtcttttcccgaatccaggatttggtttcattgcactcgaggtggtagttctggatgctcagggcagacaggagggcatccttcttcctgtcaaccagttctctgaactggctccacctgtgagtgcaggggcagacagcgagtgtgaaaaagggaagactgaccatggctggattgcaaaaggaacagtgatgggttaatgctgcttatctgttttctccatctgtgctttgactacatgcttttttggaaaatcatctcactcaaactgtgaacaccaaatataat

SEQ ID NO: 218 - DNA, 11950 bp, Homo sapiens
  misc_feature: Incyte ID No: 475473.1
  unsure 9422, 10229, 10231, 10323-10352: a, t, c, g, or other
aagctggcgctgcgcaaacagctggagaagacgctactcgagatcccccctccgcggcgctgggagagggcggagggggaggcggcgcgcggcgccagaggaggggggacgcagggggcggagcggagacagtaccttcggagataatcctttctcctgccgcagaggagaggagcggccggagcgagacacttcgccgaggcacagcagccggcaggatggcgaccgtggtggtggaagccaccgagccggagccgtccggcagcatcgccaacccggcggcgtccacctcgcctagcctgtcgcaccgcttccttgacagcaagttctacttgctggtggtcgtcggcgagatcgtgaccgaggagcacctgcggcgtgccatcggcaacatcgagctcggaatccgatcatgggacacaaacctgattgaatgcaacttggaccaagaactcaaactttttgtatctcgacactctgcaagattctctcctgaagtcccaggacaaaagatccttcatcaccgaagtgacgttttagaaacagtggtcctgatcaacccttctgatgaagcagtcagcaccgaggtgcgcttaatgatcactgatgctgcccgacacaagctgctcgtgctgaccgggcagtgctttgaaaataccggagagctcattctccagtccggctctttctccttccagaacttcatagagattttcaccgatcaagagatcggggagttactaagcaccacccatcctgccaacaaagccagcttaaccctgttctgtcctgaagaaggggactggaagaactccaatcttgacagacacaatctccaagacttcatcaatattaaactcaattcagcttctatcttgccagaaatggaaggactttctgagtttaccgagtatctctcagaatcagtggaagtcccatctccctttgacatcttggaacctcccacatcgggtggatttctgaagctctccaagccctgctgttatatttttccaggagggaggggcgattctgccttgtttgcagtgaatggtttcaatatgctcatcaatggcggatcagagagaaaatcctgcttctggaagctcatccgacacttagaccgagtggactccatcctgctcacccacattggggatgacaatttgcctggaataaacagcatgttacagcggaaaattgcagagctcgaggaagaacagtcccagggctccaccacaaatagtgactggatgaaaaacctcatctcccctgacttaggagttgtatttctcaatgtacctgaaaatctcaaaaatccagagccaaacatcaagatgaagagaagcatagaagaagcctgcttcactctccagtacctaaacaaattgtccatgaaaccagaacctctgtttagaagtgtaggcaatactattgatcctgtcattcttttccaaaaaatgggagtaggtaaacttgagatgtatgtgcttaatccagtcaagagcagcaaggaaatgcagtattttatgcagcagtggactggtaccaacaaagacaaggctgaattcattctgcctaatggtcaagaagtagatctcccgatttcctacttaacttcagtctcatctttgattgtgtggcatccagcaaaccctgcggagaaaatcatccgagtcctgtttcctgggaacagcacccagtacaacatcctggaagggttggaaaagctcaaacatctagactttctgaagcagccactggccacccaaaaggatctcactggccaggtgcccactcctgtggtgaaacaaacaaaactgaaacagagggctgatagccgagaaagtctgaagccagccgcaaaaccacttcctagcaaatccgtgcgcaaggagtcaaaagaagaaacccctgaggtcacaaaagtgaatcacgtggaaaagccacccaaagttgaaagcaaagaaaaggtaatggtgaaaaaagacaagccagtaaaaacagagaccaaaccttcagtgactgaaaaggaggttcccagcaaagaagagccatctccagtgaaagccgaggtggctgagaagcaagccacagatgtcaaacccaaagctgccaaggagaagacggtgaaaaaggaaacaaaggtaaagcctgaagacaagaaagaggagaaagaaaagccaaagaaagaagtggctaaaaaggaggacaaaacacctatcaagaaggaggaaaaaccaaaaaaggaagaggtgaaaaaagaagtcaaaaaagagatcaagaaagaagagaaaaaagaacccaagaaagaggttaagaaagaaacaccgccaaaggaagtcaagaaggaagttaagaaggaagagaagaaggaagtgaaaaaggaagaaaaggaacccaaaaaagaaattaagaagctccctaaagacgcaaagaaatcatctactcctctgtctgaagcaaaaaaaccagctgctttaaaaccaaaagtacccaagaaggaagagtctgtcaagaaagattctgttgctgccggaaagccaaaggagaaggggaaaataaaagtcattaagaaggaaggcaaggccgcagaggctgtcgctgcagctgtcggcactggagccaccacagcagctgtcatggcggcagctggaatagcagccattggccctgccaaagaactcgaagctgagaggtcccttatgtcatctcctgaggatctaaccaaggactttgaagagttaaaggctgaagaggtcgatgtaacaaaggacatcaagcctcagctggagctaatcgaagacgaagagaaactgaaggaaactgagccagtcgaagcctacgtcatccagaaggagagagaagtcaccaaaggtcctgccgagtcccctgatgagggaatcactaccactgaaggggagggcgaatgtgaacagacacctgaggagctggagcccgtcgagaagcagggagtagacgacattgaaaaatttgaagatgaaggagccggttttgaagaatcttcagagactggagactatgaagagaaggcagaaactgaggaggctgaggagccagaagaggatggggaggaacacgtatgtgtgagcgcctccaagcacagccccactgaggatgaggaaagtgccaaggcggaggctgatgcatacatcagggagaagagggagtctgtggccagtggggatgaccgagccgaagaagacatggatgaggccattgagaaaggagaggctgaacaatctgaagaggaggctgatgaggaggacaaagctgaagatgccagagaggaggaatatgagccggaaaaaatggaagctgaagactatgtgatggctgtggtcgacaaggctgcagaggctggtggtgccgaggagcagtatggattcctcaccacaccaaccaagcaactaggagcccagtctcctggccgagaacctgcatcttcaattcatgatgagactttacctggaggctcagagagcgaggccaccgcttctgatgaggagaatcgagaagaccagcctgaggaattcactgccacctctggctacactcagtctactattgagatatccagtgagcccacccccatggatgagatgtctacccctcgagacgtgatgagtgatgagaccaacaatgaagagacggagtccccttctcaggaattcgtaaatatcaccaaatatgaatcttcattgtattctcaggaatactctaaacctgctgatgttacaccgctcaacggattttctgaaggatcaaaaacagatgccactgatggcaaggattacaatgcttcagcctctaccatatcaccaccctcttccatggaggaagacaaattcagcagatctgctttacgtgatgcttactgctctgaagtgaaagccagcaccactttggacatcaaagatagcatctcagctgtttcaagtgaaaaggtcagcccatcgaagagcccgtccctgagtccatctccaccatcacccttagaaaagacccccctgggtgaacgtagtgtgaacttctctctgacgcccaatgagattaaagtctctgcagaggcagaagtagccccggtgtctcctgaggtgacccaagaagtagttgaagaacattgtgctagtcctgaggacaagactctggaagtggtgtcaccatctcagtccgtgactggcagtgctggtcacacaccttactatcaatctcctactgacgagaaatccagtcatctccctacagaagtcattgaaaaaccaccagcagttccagtgagttttgaattcagtgatgccaaagatgagaatgaaagggcttcagtaagccccatggatgagcccgtgcctgactcagagtctcctattgaaaaagttttgtctcctttacgcagcccgcccctcattggatccgagtctgcttatgaaagttttctaagtgctgatgacaaggcttctggcagaggtgccgaaagtccttttgaagaaaagagtggaaaacaaggctctccagaccaagtaagtccagtttctgaaatgacttctactagtctttaccaagacaaacaggaagggaaaagcacagactttgcaccaataaaagaagactttggccaagaaaagaaaactgatgatgttgaagccatgagttctcaaccagcactggctctggatgaaaggaaattaggagatgtttctcccacacaaatagatgtcagtcagtttggatcttttaaagaagacactaagatgtccatttctgaaggtactgtctcagacaagtcagctactcctgttgatgagggcgtagcagaagacacgtactctcatatggagggtgtggcctcagtgtccacagcctcagtggctacgagctcatttccagagccaacaacagatgatgtgtctccatctctgcatgctgaggttggctccccacattccacagaagtagatgactccctttcagtgtctgttgtgcaaacacctaccacattccaggaaacagaaatgtctccatctaaagaagaatgcccaagaccgatgtcaatttctccaccagatttctcccctaaaactgcaaagtccaggacacccgttcaagatcacagatctgaacagtcctcaatgtctattgaatttggccaagaatctcctgagcaatcccttgctatggacttcagtcgacagtctccagatcaccctacagtgggtgcaggcgtgcttcacatcactgaaaatgggccaactgaagtggactacagtccttctgacatgcaggactccagtttatcacataagataccacctatggaggagccgtcctacacccaagataatgatctttctgagctcatctcagtatctcaggtagaggcctccccgtccacctcttctgctcataccccttctcagatcgcttctcctctccaagaagatactctatccgatgttgctcctcccagagatatgtccttatatgcctcactcacctctgaaaaagtgcaaagtctggaaggagagaagctctctccaaaatctgatatctctccactcaccccacgagagtcctctcctttatattcacctactttttcagattctacctctgcagtcaaagagaaaacagcaacttgccacagttcctcttctccaccaatagatgcagcatccgcagagccctatggcttccgtgcctcagtgttattcgatacaatgcaacaccatctagccttgaatagagatttgtccacacctggcctggagaaggacagtggagggaagacacctggtgactttagctatgcctatcaaaagcctgaggaaacaaccaggtccccagatgaagaagattatgactatgagtcttatgagaagaccacccggacctcagatgtgggtggctattactatgagaagatagagagaaccacaaaatctccaagtgacagtggctactcctatgagaccattgggaaaactaccaagacccctgaagatggtgactattcctatgaaattattgagaagaccacacggacccctgaagagggtgggtactcatatgacataagtgaaaagaccaccagcccccccgaagtgagtggttacagctatgaaaagactgagaggtctagaaggcttctggatgacatcagcaatggctatgatgactctgaggatggtggccacacacttggggaccccagctactcttatgaaaccactgagaaaattaccagtttccctgagtctgaaggttattcctatgagacatctacaaagacaacacgaacccctgatacttccacatactgttacgagactgcagagaaaatcactagaacccctcaggcatccacatattcctacgagacttcagacctatgctacactgcagaaaagaagtccccctcagaagcccgtcaggatgtcgatttatgcctcgtgtcctcttgtgaatacaagcaccccaagacagagctttcaccctctttcattaatcccaatcctcttgagtggtttgccagtgaagaacccactgaagaatctgaaaagcccctcactcaatcagggggagccccaccgcctccaggaggaaagcaacagggccgacagtgtgatgaaacccctcccacctcagtcagcgagtcagccccatcccagaccgactctgatgttcccccggagactgaagagtgcccctccatcacggccgatgccaatatcgactctgaagacgagtcggaaaccatccccacagacaaaactgtcacgtacaaacacatggacccacctccagctcccgtgcaagaccgcagcccttcgccacgccaccctgatgtgtccatggtggacccagaggccttggccattgagcagaacctgggcaaagctctaaagaaagatctgaaagagaagaccaaaaccaaaaagccaggtacaaagaccaagtcatcttcacctgtcaaaaagagtgatgggaagtctaagcccttggcagcttcaccaaaaccagcgggcttgaaagaatcctcggataaagtgtccagggtggcttctcctaagaagaaagaatctgtggaaaaggcagcaaaacccaccaccactcctgaggtcaaagctgcacgtggggaagagaaagacaaggagaccaagaatgctgccaatgcctctgcatccaagtcggccaagaccgccactgcaggaccaggaactaccaagacgaccaagtcatctgctgtgcccccaggcctccctgtgtatttggacctgtgctacattcctaaccacagcaatagtaagaatgttgatgtggaatttttcaagagagtgcggtcttcctactacgtggtgagtgggaatgaccctgctgctgaggagcccagccgggctgtcctggacgctttgttggaaggaaaggctcagtggggcagcaacatgcaggtgacactgatcccaactcatgactcagaagtgatgagggaatggtaccaggagacccatgagaaacagcaagatctcaacatcatggttttagcaagcagcagcacagtggttatgcaagatgaatccttccctgcatgcaagattgaactgtaaaaaccaaggccagccacaccacaggatctgaactttgtttccagaaattcttcaatttgaaatcaccttttctaaaaagtcaattcatctagttaagtcgctgaacaattacctgccaaatgctatactgtgtcatggtgatgcaagtcactaaatttctcagtttttgctgattgctaagggaaataacagtatttccacaatagggttcaaattcctgcaaaattacctaccccagttcatctctgctgaacatttggaaaccatgcactagccaacccaactgacttctgctaggtagaggcatttgtcttagagagagagagagcgcgggagagagtgagagagagtgagagcacaaagataacgcaggtgagagagagagaaagtatgaggaaaggaaaggaatgcaagagaaggagatgtaatgacagagagttctggtgagatacccagagagaaaaagagagagcagggtggggtaaggaggagaaaataaaccaacaattaggtctgcattttctcaggcagtaggcattctttagtctacataggcaaagttttccatttttgtcagtctgagtcatcaaaaagagtcttaattttctaaaacaagttggctagaagaaagtaaaaagaacaacacttgttatgagggcatgtgatattttcacatcttaattaagctccttcagtttgaaggctgcacactgacataatgtagtgagtgtagactggccatgcaagtggtttgggccccattcagaactctcagactctaaacacacaagtagattgatctaaggcatgctcccagcatttgtccacccacttagtccactctgagtcgattaacctgcatgcagcaacacccaagtccaccccaattaactgaagcaaataccaaagcagttgggagtacatatggtagacaatttgccttaggaagtgacttgaatgtacaaagatacttgatgcacttattttttaatgtgagacagcaagtttataaaacatccatataggattatagatacttaaaggaacacgtgggtgagcgtgtgtgggggtactagaagctgatctgattggtccaacagtttgatgctgagtcatgcgtgttgaatcccacttcagtgcacctgtggcctctcagtcaaacaagttgtgcctttcacagcttctttactactgcaagttcaagactgaaatggcttctatgatcagaactgggaaaacagtgaatcttatggtggaagaggttctcagcaagtgtacagtatttaccttcctttgtcttacattggctttttaaattttccattaatttcaacataattatgggaacaagtgtacagaagaattttttttttaagatatgtgagaacttttcatagatgaactttttaacaaatgttttcatttacaggaaattgcaaagaaaattctcaagtgatagtctttttttttaagtgtttcgtaagacaaaaattgaataatgttttttgaagttctggcaagattgaagtctgatattgcagtaatgatatttattaaaaacccataactaccaggaataatgatacctcccaccccttgattcccataacataaaagtgctacttgagagtgggggagaatggcatggtaggctacttttcagggccttgacaagtacatcacccagtggtatcctacatacttctttcaagatcttcaaccatgaggtaaaagagccaagttcaaagaaccctagcacaaatttgctttgggattttcttttctggaaaaaaaaantaaaagaaatagtacattgaaaacaaatgaattctcaactcctacggttcatgtagagtttagagaaaatttccatcattgtcatcattgaactgtgaacctgggaagccagatcatgattaacactgacattcaagtttcaagttgcagatcaatgcacccagtgttcagatgaggcaaacttctccgtgacaactgtgctgtgctctgtcacattacatttcctgcagactctaagatctacggagtagagaacaatgacctcattttattttctatgttagttatttatttcaaaattaacattttagttgatttttgtctgataagtctatgttttgcactgctaactatgatgagggtttaaaaaaatgcttcttcagggtcctttcactgaggacctatgcagtctacttaatgctgtgaattacatttttcaaatgtttaattttttaaagaaaattaatattctatttttgttaggcttctctagaaatgcagcttttatttattaccccatttctttcaagtccttggaaaataacatattaagggtacaagaaattaacacatgatggaaaagtcattgtgacgccaatgaatttcattgagtataaactcatctacttcaaatttattttataagacaacctaagatactcaagataattatttaatggttagctcttaagttgaattggtctacataatgcgtgggaagaaaaccagatttttagccttcttgccaaatccagacctctggttgatttttctttgacagaagatgcaagttatttgtccaatttnanaattaaatgtatttaacattattttgctttaaaaactataaacattgtaggagaattatagccagtcttcagttataaccactccaccctcnnnnnnnnnnnnnnnnnnnnnnnnnnnnnntgggctatgggatttaatgggaaaaatatgtaaaaactgtcactagtcagctggctctttttcctatgaaatctatcagtacctttctccatccgttgttctcaataatgaccacagagcctgagtataccaagaaaaccaatattcgcattacaggttgctcctgtccttccagacacctttcctgcctgtgtgactaacctaattttgctagttccataaatacacgattagtttagtaacagccatcacaatgtaccatgtacattcatggtgagagctaaagatcgacacagacttctaggagctttgttcatactgattacttaatccaattgtatagattgaatatttgagtggaaggaatttacactctgtttaaatgatgggattctatcgagatagcactcatgatcatgacctttttggtagtattcttaaacaaaattctacagagactaaatgttagcgatgatcctccattttcaattttaaccaattctgtcccctttctcaaaaccctgagccctgtgcatgctttctcagtcttgtggtgggactggatacaatgactaacttcccctcctcccctctttaaacaccattttccatggagttcaaaaaaattttttttcttaacgttacatatcatagtgaatggtttccccagtgtatatgaatgttttaagtgtctccaatagcttatgcagtctaggagctttccaatactcatttaattaagatttaatcatttgctaatggaaatcttaccacctttcattttccctctgttaccaaatttcagctcttaggagctgctctacaattctgaatttgcttttcttgcctctctttagtcacctgtcacaggaggttcctgctcagtaatgatattgtgagttaggataataactttttttttttgtgcttcagatttagaagaaaagatcctgtttccatttgaaaggaactgtaagcttttatcttttaaccaactgaacaatacaccaaaagcagcctagggatgagcatttctttgaaagcaattaggttattcacctggtattaaaactatttactgttaaaaaatctgtgacttcatgaagttgatttttaaaggcagcatcaaaaactgaaaaggaagggaaaaaataggcagcttctctgcacttgtttggagctccccaaaacaggagccatggagaagtggcatcaagaccgggctgccctttcgagaacaccctgtggcagttcagagacacgcttttcctacactgcatgcagcccctctttccagcactggaaagaagtggtcttgagcccagctgagaagcacttcacactcctctctcttgttctgaatggtgtttgtgtcagtctgcagctgtgtatggtattatgtcttataatcctgcatcacttctatcctatccagtcatatctaatgtagaaaattagtttccagtgaaagtaatatgtagtgcttttatgatatttgtgtgcaatatcccctcttccattgaggatatttgatgtaaaggaaaaaaaaaaactcagttccacaataaaatacaaaagtggcaaaaaaaaaaaaaagg

SEQ ID NO: 219 - DNA, 7053 bp, Homo sapiens
  misc_feature: Incyte ID No: 354430.4
  unsure 727, 736, 1204, 1985-2065, 3071-3101, 6410, 6426, 6429, 6432, 6441, 6450,6772: a, t, c, g, or other
tgcagctgctcaccggatcctcagtcttccacaattgaaccctgtttacagccccgtgcagcctggggctccttattggcaacccttaagaacatggcctacacgggttaccccacagcctatccagcagctgcccctgcctacaatcccagcctgtacccaccaatagtcccagttatgctccagagtttcagttcctgcattcagcttatgcaactctgctgatgaaacaggcctggccacagaactcgtcttcctgtggcactgaaggcaccttccacctcccagtggacaccgggaccgagaaccgaacttaccaagcatcctctgcggctttcagatatactgcggggacaccatacaaggtcccaccgacccagagtaacactgctccacccccctactccccatcacccaacccctatcagacggccatgtatccaatcagaagtgcctacccccagcagaatctgtatgcccagggagcctactacacacagccggtgtatgctgcccagcctcatgtcatccaccataccacggtcgtccagcccaacagcattccctctgctatctacccagcacctgttgccgccccgaggaccaacggtgtggccatgggcatggtggcaggcaccaccatggcaatgtcagcaggtaccctgctgactacaccccagcacacggcgattggggcacaccctgtctccatgccaacatatagggnccaaggaancccctgcgtacagctacgtgcccccacactggtaaagcctgcagcccatccaaatctggagtcacacattgtatgcaactactcaagtcttacaccggtgctggagcagttccctagcagcaccacctctatttgcaagaagagacaacggaagtgcaagggtcactttatgcatctttaatggtttgatttttattttggtttttgtaaaagctgctttttctaatctcctgcctctccccaactgtccccctcttagcccctgcccttccagctctatccccttcctcctacctgaccaggccatgtcctctctgctcttccctaagtgtcctgtccctggggatcccagtctagaggcaagcagagagtagggtttattgcagtggttcatctgaaggctggattccatttgaagagcataaacagatgtggtccagggtaggaactcagagctgttgagcaggnctacatctctaggggagtgttctggttgttttttcttaagcaagattagttcaggacattcccatgtcccagacacaaatgaaatgtctcctgagaaccattgcaacagaccaagaacaaaaccacctgagtatgtaggcgtgttattagcagcttaataccccaggctgagaacctggggaaaaaagtctttagaatttgggggagggtggggggagggagggcattgtggggaaggagagggaagaagggaggagcggtgcttgcctcatggctttggtttgaaaggtctctggccaaagcatctggccctggaccttctgatttgcacagtgatgttaactgacctggcacttcctcaaaaggtgattttgtccttagacctgccaagcggctgcagggtggtaggatcccagcatcccgaggccttggaaggccggatgccctgtgtcatccagacttcagcctctgagctgtcatggacccactctgatgaggagcttcctcctgattggagtgggaacctagggcatttctctcccttttcttttgcccttcccagtgccaggactcacctgtctgaccatagagcttgcaggcaggccaagctcttggttacctgtgccattcatggcccaagtgaaggaaccacattccaggtgggtgctggcagctctgaaggtgaggatagtgaaggaaaagcaatagcaataaacatttcatagactcatggaactgaagggaccttagcaatcatctcatccatttccctatttggcannnnnnnnnnnnnnnnnnnnnnnnnnnnnnnnnnnnnnnnnnnnnnnnnnnnnnnnnnnnnnnnnnnnnnnnnnnnnnnnncctagtgggcaccttgcttacaaaaatttacctagggacggattggcttggttttgtaaaaattaagtcggcagcgcccatacctggtgagtctggaatggtctctgggctcctgtttctgctcttttcctccacggactccaaaggcgggggttgaagactgggcagaggctacatgggggcggatggcaggaacagaaattgcaaatgaagaaatagcatttggaaattctgtgaagacatctggaacttccgtcctgtacctgactccacctccaggagaaggagcaggtggactggccgaaaaggagaggccatgcttttaggacagtagcccctcatcccgagaggagaggaagaggaggaagacagtgggagtcatcaggagaggagaatgaggatgaggcccaggagacaggctcatctgggagaagagggacccctgggacgaggaggtccctgctagtctcagccaggagcctggattgcccagcagcagcctccggcacccagcgcttggctgggccagcagcccctctgggggtggggcacgaacattttattgtaaaaaatgggatcattgacaacatttgggactttaaaaaactgctttcatttaaaattcatgcaaacttggacatatccttaccccaacctcccatgtctccctaagggagggaaaaatcaggaaacccttggggttggaaggagctcagaagctgtctagccattcccaggagggtaaagcccatcagcctccttggcctagagccaggagtttgggggcccaccttcctgggcttccaaggaactttaggaccagtaagaaaaaattcagctgttctaaattatctgttctgggtgctgatgaggtttcactttaaaacaatagaaagttttccagtgttaattcactttttgcaaatacctccttccaccctctttggttttgtaaaggtgggtgaaggttgttctagattatgtcatacgtgtttgaaaaatgccnnnnnnnnnnnnnnnnnnnnnnnnnnnnnnncctttggatttgtcaggtgcatcacagaggtcaaagcacttcacggcctttcatgtactcgccctgagagggacagggttagagttattacagtcaattgacaaatgaggaaacaggttatggaagggaacaggcccacagtgagcagcatgctggtatccgctaggcttcccagaaccctgctgcctccatgtgggctggggtggaaccacagagaggagaaaggaagaagaggagacctaggaatgaccttgtaacttttgttctttcaacaccagtaagtaaaactaacagctggacctcacagttcacagaacagttgaacataaattatctggtttaacccgatgaaatagaggttatttctcctatttgatccataaggaaatcaaggcttggaaaagtcaagtgacttgctaataagtgacagagccactcgaatcccaggctgtctgctgtctcgttcccctccatctgatccccacacaggctcacgtactgaagcatctgtgctctgtgccctatcttagcacctactatgtaattcaagagcaaaggggggccccaaggtgaaaataaggcactgaaaggctgtggtctggaagagcccaggtccagcacccctttttcagtatgagccccagttcagccggcctcagcctcttgctgtgatggagatccacaagcctagccaagcttggggagtcactgcaaaaggactgagcccaggagagcggggacagtcatgtgcctctggtaggatgggcacagttactggtaaggtcacagagatctagtgggaggtaccataggtagatacctccaaagattctagatggcacggtggtcaagctagacaaaaagtcagagctggaagggccgtctcattgaaggcaggcaagcaagagaggacaagggatgtagccgcctgacagtgagctacagcactggccccaggatgcaaacccctctctcctcctcatgccactgcctctccccaagtgcaacacctatggccaggatcaggggtacagatggctcgttaccagccaacccttttgaattcttctacttctacctgaccccctctcctcactggcctggggtcaagaagtttgagtctgggagctggattgcctgcaaatagtgaaagcctgaaacataatggtttgccatgttttgaaaaaaaatgcatatttaatttcttcctcatgagataggacagttgctgttctttcttacctggcaatgaccctaaaatgtatatcctctttcctgaatatttagcagagacacacacacctgtccagagcgtttttggtatgcaaagtactttgacattggttgccaaagtcctccattttatagatgaaaaaactaaggctcaggaggcttgagacttgctaaaaggtcacacagcttggaagtgattcttcaaatcctctgctctttctgctgccacctgctgggtctcttggcaagcatggagggaggggctaactgtactttatagagctgggaagcccagtctctgagctgagcagatttgtatgaactgctttgggccaggacctgtaatgagccctggggagggacccagaggcacatctaactggcagcacaaggaggatgagaatttgcaactaaaggcctcacttggacaaaacactttggggtcacaatgcccaggaccgaagacatgttcaaggacagcacgaggcatctttctattgggagacccatgtccttggtaagcctgcacacctggcttcctaatccctgagagcctgcccactgtccagatccagtgagttggtacaaaacgtacagactgaagtccctgggcttgcttttcccatgggtgaggaccagaaccagactctgagcatccttacccctggccacccgaattgttccaagtttgaggtaccccgttcccagagatctgggggtccttctttggagggcttgctttgttctgatggccttcagaaaggaatcacatgaagtataaaaggacaggccccttggtcaccaagttttggctcctcatacagataggactcatccaggttcccagcgaggcactgactaagcgaggctcagagcttccatatcaaattcctcagctttgttctgtgcccagagggggtgggccccattctgggccctgtgaactttgtcttatatatcaccatctgtatcagaattcctcctcaattgcagttaagtgaaaatacgtggaagtctgcttttccatcctgtattctcccacatcactactggctgtgcggcccccgctgcttggccaagcttgggaatccagagaggggcagtagtagagtgggccagttgggacccacccgcagagctgaagaaacacgccagactaactgatgggattccacaccggagcctctgagcgcacaggcaggcatgccaagggggctgcagggtttgtcctttacttatctgcccctttcctagaaaactcctcgtttctgaaattaggcattatatggttccaggacccagccttcaaaattcctggcaggccagcttcaacattccatggccagccctgcctaagccagacttgggtcccagtccctcagtctctccagtggatatcttctgtggtgcatgctgttgagtccaacccaaaggccaaccgaggcacacaggagttgggactggctgccacaaagctagaaagggacaaaacagcacttgcttccctatggccacatggatagtccctggatatccttgctgtggtagaggtcctctacccattccagccactgatagcagggggattttccttcctaaggagaacagatgtaacagctttgcaaagtaccggcccataggaatcaaatgggtgagatcagctttgggcctgaccccagcaagaccagcatctccagaccccagcctttctcctcaggcctaagagagtcagggaaagagaggagactgtcccagagaccttctcctcgggtcagccagatagtctggatctatggtgtgactcaagctcctccttacccagggggggtaaggccaggcctctagctacttggagttgtctgtaataatcttgaaaggcccaagggcctgtccccatcctgacttaaaggcatctgcttccctgtttcatatcacatgacagagaaacctgttctcatggcatgtaacatccctgtgaagagagcgttgtatatgattttgtattttttaattcattttaatctacaggttggaatctaatttttaaattttattggaactcacattttaaaaagnaattaaattttaaatnatnatnataataatnataataatnataaacctttgaccagtgtcttccaagtagtttgatcaaagaatttataggtgttttcaaaacacagtccggagtgtaaagattggaaagccccatggccttgcctgtgtgtatgaagtgtaaatctggttttgttttgttgttttggattcttttgggtttttgttttgttttgaagatcagacagtgatcactctgaaagattgaagccaagaatttgtaactatggtatttactgtaagctgtagaacactcaataactattaaaaaaaaaattcccccccaaaaaaaagtcttaggtgactagactgagtggttcttngggagggaggcacagaggactgtcctgggccagtgagtcccttgggcgtctccccaagttgatgctaaatttgttctcagtagtcaagaaaaacctatggtacatcttacagctgatctgacaggggtctgccctaagggtctcacagctgctggggagctttaagtggcaacttcagcacccaccctaagtgtgtgatgtgggagcacagtgaggccattcagagttgaaatccattgagccatccgcgcaataaagctgacatctattgtgtgaaaaaa

SEQ ID NO: 220 - DNA, 2210 bp, Homo sapiens
  misc_feature: Incyte ID No: 468221.12c
  unsure 231, 274, 348, 1366-1671, 1824: a, t, c, g, or other
cccaacctcgcggctgcccgaaggacctgttgtgccgggtccggaaagcgtgtttcgctccctttcccttgagggagtggggagggaatgtgactcttttcgcccagcgccgtggactcgcggcttgtggctcccaagttagggagtgagaggatcgcccgccgagggggtggctccgcagcccggctgcgcgagacgcttcccgctcggggacccgccttccgaggccangtgaacgttaccggccccctgacctccagcagatccacaccantgttggagactgaaccgttgcaaggaacagacgaagatgcagtagccagtgctgacttctctagcatgctctcngaggaggaaaaggaagagttaaaagcagagttagttcagctagaagacgaaattacaacactacgacaagttttgtcagcgaaagaaaggcatctagttgagataaaacaaaaactcggcatgaacctgatgaatgaattaaaacagaacttcagcaaaagctggcatgacatgcagactaccactgcctacaagaaaacacatgaaaccctgagtcacgcagggcaaaaggcaactgcagctttcagcaacgttggaacggccatcagcaagaagttcggagacatgagacgaaagtaggcggtacgaaccctaatggaggcagttttgaggaggtcctcagctccacggcccatgccagtgccccagagcttggcaggaggctcccggcggaccaaggaggaggagctgcagtgctaagtccagccagcgtgcagctgcatccagaaaccggccactacccagcccatctctgcctgtgcttatccagataagaagaccaaaatcccgctgggaaaaacccaggccttgacattgttattcaaatggcccctccagaaagtttaatgatttccatttgtatttgtgttgatgatggaccacttgaccatcacatttcagtattcatagatgactgtcacattttaaaatgttcccacttgagcaggtacacaactggtcataattcctgtctgtgtaattcgatgtatatttttccaaacatgtagctattgtttgctttgatttttgcttggcctcctttatgatgtgcatgtccttgaaggctgaatgaacagtccctttcagttcagcagatcaacaggatggagctcttcatgactgtctccagcaataggatgatttactataaatttcatccaactacttgtgatctctctcacctacatcaattatgtatgttaatttcagcaattaaaagaattgattttaatgactttgaattcttaatttctttgtcttaaaagttgctagttatgattttacagatgcaattttnnnnnnnnnnnnnnnnnnnnnnnnnnnnnnnnnnnnnnnnnnnnnnnnnnnnnnnnnnnnnnnnnnnnnnnnnnnnnnnnnnnnnnnnnnnnnnnnnnnnnnnnnnnnnnnnnnnnnnnnnnnnnnnnnnnnnnnnnnnnnnnnnnnnnnnnnnnnnnnnnnnnnnnnnnnnnnnnnnnnnnnnnnnnnnnnnnnnnnnnnnnnnnnnnnnnnnnnnnnnnnnnnnnnnnnnnnnnnnnnnnnnnnnnnnnnnnnnnnnnnnnnnnnnnnnnnnnnnnnnnnnnnnnnnnnnnnnnnnnnnnnnnntaataagtagtcaacttttactgctaatttggtgaacatgagagaggatatgaaaataaatattacctcagctatcctaggatgttaaaataatctccaattttaaaattctctccaatctacatacagtagtagttagtcagataaaggatntccaaaaaagagatagctagaaaatgggagaagcagagttctgcaacccctttcagtttgtaaattgttcacatgtatgaaaataactggtatttatcaatccactcagatttctgcactaacttttatcttatatatcatatgtatctcttttctttttctaaatgggaacatatatttgttattaggtggcagagatatagccttaagatatatttgtaaaatgcacactgaatagacatccaacctaaaaaaaatcactatttaaaaagcccatataatatatacatatttgttagcatgctaattgttcatgttttgtgtttattaaatagaagtgatatatatgacattttgaagtaaagcacatctgaaaaattctcctc

SEQ ID NO: 221 - DNA, 1418 bp, Homo sapiens
  misc_feature: Incyte ID No: 468221.13
ggtggactggaaggggcggaggtaaccagaagcggctagtggcggctgcctgcgtccccaaccccctccgcgcagcgctcgcgacacgcgtgccaggagtgggagcgagcggcggggccagctgcgttctgagcctgggcgcagctgccatctgctctgggaagcaccagggtgtccccgccgccctgcagctcgaagtcagccaccatggaggcgcaggcacaaggtttgttggagactgaaccgttgcaaggaacagacgaagatgcagtagccagtgctgacttctctagcatgctctctgaggaggaaaaggaagagttaaaagcagagttagttcagctagaagacgaaattacaacactacgacaagttttgtcagcgaaagaaaggcatctagttgagataaaacaaaaactcggcatgaacctgatgaatgaattaaaacagaacttcagcaaaagctggcatgacatgcagactaccactgcctacaagaaaacacatgaaaccctgagtcacgcagggcaaaaggcaactgcagctttcagcaacgttggaacggccatcagcaagaagttcggagacatgagttactccattcgccattccataagtatgcctgctatgaggaattctcctactttcaaatcatttgaggagagggttgagacaactgtcacaagcctcaagacgaaagtaggcggtacgaaccctaatggaggcagttttgaggaggtcctcagctccacggcccatgccagtgcccagagcttggcaggaggctcccggcggaccaaggaggaggagctgcagtgctaagtccagccagcgtgcagctgcatccagaaaccggccactacccagcccatctctgcctgtgcttatccagataagaagaccaaaatcccgctgggaaaaacccaggccttgacattgttattcaaatggcccctccagaaagtttaatgatttccatttgtatttgtgttgatgatggaccacttgaccatcacatttcagtattcatagatgactgtcacattttaaaatgttcccacttgagcaggtacacaactggtcataattcctgtctgtgtaattcgatgtatatttttccaaacatgtagctattgtttgctttgatttttgcttggcctcctttatgatgtgcatgtccttgaaggctgaatgaacagtccctttcagttcagcagatcaacaggatggagctcttcatgactgtctccagcaataggatgatttactataaatttcatccaactacttgtgatctctctcacctacatcaattatgtatgttaatttcagcaattaaaagaattgattttaatgactttgaattcttaatttctttgtcttaaaagttgctagttatgattttacagatgcaattt

SEQ ID NO: 222 - DNA, 398 bp, Homo sapiens
  misc_feature: Incyte ID No: 399187.1c
acgtgtttcaccatttttggccaggcagagaggtccacacgagcaggagaggcccacgaggagcagggccagcagacgagtgagcatcgaggttcgatgcctccttgagatctgctctgctgttctcaccgtcccccactcccctgccaggcgggtcatggagccaggatcggagcccgtggccaggcccacatgtgtcccctggcttctccagctaggcctttctgggcaaggcttgccttttgttttgggccttggacgcccccttctgctgcttttcagttccaggatctcggctagggatgtatcgaacacaaagtcccagtgcagagaacaacttgactcacctcgaacagactcagcactctgcccaagcagtgcaatatggatgctttgtg

SEQ ID NO: 223 - DNA, 555 bp, Homo sapiens
  misc_feature: Incyte ID No: 903338.12
cggctcgagtcatcccaaaagacctttaaataggggaagtccacttgtgcacggctgctccttgctatagaagacctgggacagaggactgctgtctgccctctctggtcaccctgcctagctagaggatctgtgaccccagccatgaggaccctcgccatccttgctgccattctcctggtggccctgcaggcccaggctgagccactccaggcaagagctgatgaggttgctgcagccccggagcagattgcagcggacatcccagaagtggttgtttcccttgcatgggacgaaagcttggctccaaagcatccaggctcaaggaaaaacatggcctgctattgcagaataccagcgtgcattgcaggagaacgtcgctatggaacctgcatctaccagggaagactctgggcattctgctgctgagcttgcagaaaaagaaaaatgagctcaaaatttgctttgagagctacagggaattgctattactcctgtaccttctgctcaatttcctttcctcatcccaaataaatgccttgttacaagaaaaaa

SEQ ID NO: 224 - DNA, 1213 bp, Homo sapiens
  misc_feature: Incyte ID No: 208529.1
  unsure 688-708: a, t, c, g, or other
cgcatcctgaggctctcactgaccgagcagtagcgccccctgccgggaccctcgccagcgccacgcgcgccacgcccagggccaggagccagacaaaccccggcctgcgcgcctgcagagcggcggctggagactggagccaccgcctcgcgggtgcagcagcacagcaggcacggttcggggagggattcggcatggccgcggggtaccttcccaggccagggccctggaggcaactggcacggcctggtccccctgctttgctgtattctgattccccaacccgctcccctgggctcagatctgtcctgtcctagggcggagccaggcggtcctgagggggagatgaatccttagaggagcgctgtccctatcccttgctccttctggccggtccgcatttctgttcactaaccccactccaggacactgcccctgaagcctttgcatctctgctcttcactcctggggggcagctgagctccccgcgtgctgtgtcactgctttgttccagacacaaaccagcacgtctagggcccagcccctcccccaccccgggcatttcagcgtcaagtgcacttagcggggtacccggctcccccagcccccacacccgtcctgggtctcagggtggttccagcttctccttgggcagccagaagttggagtcccatcccccaaggcacannnnnnnnnnnnnnnnnnnnngatcagggagtgtgtccaacgtagccccctggcctgtgcaagccctgactccctcatggtgcctcggagagtggggagcatattgggctggggtaagcactagacccaagtagactggacacaaagggctcgcccagggccctggcgccacccccaccccttcccaccagctgctgctagcctctgtggttgtacatcccacttgcccccacacggagactgactctaaaacccttcatccaatggtgctaacccccggctctcccctgccccacctcacccacccagagaagcacagaccccgccaggggcaggggcccaccgcacacccttgtcccgggcctgtctgggactggccttcccggctcagccagtgaggctcagaagggacacaaagagggatggaagaaaagaacaaagagaaactgttcctcccacccccttccctgatgccaggggcaccagactgattctgaggcacaaataaaagaggcttcataccggg

SEQ ID NO: 225 - DNA, 3987 bp, Homo sapiens
  misc_feature: Incyte ID No: 1040667.52
ggatgcctgtttatggagctataaacctacctacatatttcataaacaacctatgtgtataaagaaaaacatgttcatgaaacaagctttaccaaatgttacttactcattttttttctattctattttttttgtgtgtggggggattgtgggagtctccgcgtcccgctcgctgggagagaggtacctctccttttccctctccctttccctaagagttgtctgctggttctcagcttgaagaagattctgcagtccttattgatcctttttcttggcgttaccattttttgaagcaaagttaacctagctttctagtttgagctttctttttggccgtctttaaaaaaaattttttttttaatctataaaatagacaagagctagttctacaatgtccaagtcattccagcagtcatctctcagtagggactcacagggtcatgggcgtgacctgtctgcggcaggaataggccttcttgctgctgctacccagtctttaagtatgccagcatctcttggaaggatgaaccagggtactgcacgccttgctagtttaatgaatcttggaatgagttcttcattgaatcaacaaggagctcatagtgcactgtcttctgctagtacttcttcccataatttgcagtctatatttaacattggaagtagaggtccactccctttatcttctcaacaccgtggagatgcagaccaggccagtaacattttggccagctttggtctgtctgctagagacttagatgaactgagtcgttatccagaggacaagattactcctgagaatttgccccaaatccttctacagcttaaaaggaggagaactgaagaaggccctaccttgagttatggtagagatggcagatctgctacacgggagccaccatacagagtacctagggatgattgggaagaaaaaaggcactttagaagagatagttttgatgatcgtggtcctagtctcaacccagtgcttgattatgaccatggaagtcgttctcaagaatctggttattatgacagaatggattatgaagatgacagattaagagatggagaaaggtgtagggatgattctttttttggtgagacctcgcataactatcataaatttgacagtgagtatgagagaatgggacgtggtcctggccccttacaagagagatctctctttgagaaaaagagaggcgctcctccaagtagcaatattgaagacttccatggactcttaccgaagggttatccccatctgtgctctatatgtgatttgccagttcattctaataaggagtggagtcaacatatcaatggagcaagtcacagtcgtcgatgccagcttcttcttgaaatctacccagaatggaatcctgacaatgatacaggacacacaatgggtgatccattcatgttgcagcagtctacaaatccagcaccaggaattctgggacctccacctccctcatttcatcttgggggaccagcagttggaccaagaggaaatctgggtgctggaaatggaaacctgcaaggacctagacacatgcagaaaggcagagtggaaactagcagagttgttcacatcatggattttcaacgagggaaaaacttgagataccagctattacagctggtagaaccatttggagtcatttcaaatcatctgattctaaataaaattaatgaggcatttattgaaatggcaaccacagaggatgctcaggccgcagtggattattacacaaccacaccagcgttagtatttggcaagccagtgagagttcatttatcccagaagtataaaagaataaagaaacctgaaggaaagccagatcagaagtttgatcaaaagcaagagcttggacgtgtgatacatctcagcaatttgccgcattctggctattctgatagtgctgttctcaagcttgctgagccttatgggaaaataaagaattacatattgatgaggatgaaaagtcaggcttttattgagatggagacaagagaagatgcaatggcaatggttgaccattgtttgaaaaaagccctttggtttcaggggagatgtgtgaaggttgacctgtctgagaaatataaaaaactggttctgaggattccaaacagaggcattgatttactgaaaaaagataaatcccgaaaaagatcttactctccagatggcaaagaatctccaagtgataagaaatccaaaactgatggttcccagaagactgagagttcaaccgaaggtaaagaacaagaagagaagtccggtgaagatggtgagaaagacacaaaggatgaccagacagagcaggaacctaatatgcttcttgaatctgaagatgagctacttgtagatgaagaagaagcagcagcactgctagaaagtggcagttcagtgggagacgagaccgatcttgctaatttaggtgatgtggcttctgatgggaaaaaggaaccatcagataaagctgtgaaaaaagatggaagtgcttcagcagcagcaaagaaaaagcttaaaaaggtggacaagatcgaggaacttgatcaagaaaacgaagcagcgttggaaaatggaattaaaaatgaggaaaacacagaaccaggtgctgaatcttctgagaacgctgatgatcccaacaaagatacaagtgaaaacgcagatggtcaaagtgatgagaacaaggacgactatacaatcccagatgagtatagaattggaccatatcagcccaatgttcctgttggtatagactatgtgatacctaaaacagggttttactgtaagctgtgttcactcttttatacaaatgaagaagttgcaaagaatactcattgcagcagccttcctcattatcagaaattaaagaaatttctgaataaattggcagaagaacgcagacagaagaaggaaacttaagatgtgcaaggagatttaatgatttcaaagaaaataatggttctttgtttttaatgttaaccttttttaaatacaatactgatagttagaagaaaactattgtactcttttgttttagtggagaaataatagatgtctgttcatgtgttaagtgttatagcaaaaaaaatacacatatggttaagttaatgaatagtttttgttttatcagaatggcaacagacagaagtactttgtagagattgacttcctaagctacttaagacaacttgcaccactaagaaaaaaatgtagaaccatttggaaaaatgaaatttagtagttccaagtttcaaagaaatgtcaacattttattccattcaataaagaacaaaaccaatagtgtttttattactttcatctgaaacattccatgttttaatctgagccttgcagactttcatttggagtttgaacccgttttggttgcatttcatttttggagaacttaattaacgtgagattggcaattgaaatgcaggtgcagttttctgttaatgtcatgctgttgtttaggtaataagaaatattaagtaattggctttagattttgtaatttttttccctgagttcctgctagatttcgtattctagtagtcaatgtattttcagtgaaatgcaaaaatattcccgttatctttgaccagtattaatttttgagatcttactgcttgtcacttgaatcccgtgattgtcatacatctctggtataagcaacatttgatttttgaagtgtgtagaccatctcttcatattttcaagatgtaattttacatttctgcatttttaaaacagtttggccataatcctagatgcacgcttctaattcatgtacctgcacatgtgacctttgtgaacagaaatttgcatgtataatttgtgtttacttgtaactttctggttatatactgcttatatctgtggattcaagttactgaagtgaataccaataaaaagaaaaccctaggccatgttaattggttatacatgtttggaatgttaaccaacgt

SEQ ID NO: 226 - DNA, 842 bp, Homo sapiens
  misc_feature: Incyte ID No: 147665.1
gtttacagctgttttaaaaaatgatcaaatctttggagaagccaatgttgaatagaaaactcacaacaatctcaaaactctatggagccttaaattagaagcttacaacctcaaagtgaagatgctaagtggtttgtaaagagcacttgtgacaaaacaggcacaggtgacatatgacacataacgttggcttcactatgattacattcagtcaagttttgtcaacactttatttcataactatatagcaacatgttgccatatataaaaatactttttttgttttgagactttgtctcaaagaaaaaaaaacaataataggtaaagtatttaaggaattctcagatgccttatggacctcttcaaaaatgtggttagccaattgattcaacttttataggtttatatgctctcatgtaaacctatttgtttccgagatcagacgagatcgggcgcgttcagggtggtatggccgtagacaacctatttgttaaaaacccttggaaacacatcttttagtagaggttcttatttacttataaagattaataatcaaattactacaattaatatccatttagccttttcagtagtctaaatatttggtaactccctagccatctataacactagttcaaaacaaggctaattcataacctgtcttaaaaatgtttgaagtggtatcaagagcattgtttatgcatgttgtgatactatttgtggaactgtttaatgagctatttcaaactgctagaagaaaatgaaataaaaatggaaaaatactgtcaaattttgcctgtctggactttttaagtagtattaaaaacagaaattcaaatgag

SEQ ID NO: 227 - DNA, 1777 bp, Homo sapiens
  misc_feature: Incyte ID No: 218524.4
aaaacattcagagacagaaggtggatagacaaatctccaccttcagactggtaggctcctccagaagccatcagacaggaagatgtgaaaatccccagcactcatcccagaatcactaagtggcacctgtcctgggccaaagtcccaggacagacctcattgttcctctgtgggaatacctccccaggagggcatcctggatttcccccttgcaacccaggtcagaagtttcatcgtcaaggttgtttcatcttttttttcctatctaacagctctgactaccacccaaccttgaggcacagtgaagacatcggtggccactccaataacagcaggtcacagctgctcttctggaggtgtcctacaggtgaaaagcccagcgacccagtcaggatttaagtttacctcaaaaatggaagattttaacatggagagtgacagctttgaagatttctggaaaggtgaagatcttagtaattacagttacagctctaccctgcccccttttctactagatgccgccccatgtgaaccagaatccctggaaatcaacaagtattttgtggtcattatctatgccctggtattcctgctgagcctgctgggaaactccctcgtgatgctggtcatcttatacagcagggtcggccgctccgtcactgatgtctacctgctgaacctagccttggccgacctactctttgccctgaccttgcccatctgggccgcctccaaggtgaatggctggatttttggcacattcctgtgcaaggtggtctcactcctgaaggaagtcaacttctatagtggcatcctgctactggcctgcatcagtgtggaccgttacctggccattgtccatgccacacgcacactgacccagaagcgctacttggtcaaattcatatgtctcagcatctggggtctgtccttgctcctggccctgcctgtcttacttttccgaaggaccgtctactcatccaatgttagcccagcctgctatgaggacatgggcaacaatacagcaaactggcggatgctgttacggatcctgccccagtcctttggcttcatcgtgccactgctgatcatgctgttctgctacggattcaccctgcgtacgctgtttaaggcccacatggggcagaagcaccgggccatgcgggtcatctttgctgtcgtcctcatcttcctgctttgctggctgccctacaacctggtcctgctggcagacaccctcatgaggacccaggtgatccaggagacctgtgagcgccgcaatcacatcgaccgggctctggatgccaccgagattctgggcatccttcacagctgcctcaaccccctcatctacgccttcattggccagaagtttcgccatggactcctcaagattctagctatacatggcttgatcagcaaggactccctgcccaaagacagcaggccttcctttgttggctcttcttcagggcacacttccactactctctaagacctcctgcctaagtgcagccccgtggggttcctcccttctcttcacagtcacattccaagcctcatgtccactggttcttcttggtctcagtgtcaatgcagcccccattgtggtcacaggaagtagaggaggccacgttcttactagtttcccttgcatggtttagaaagcttgccctggtgcctcaccccttgccataattactatgtcatttgctggagctctgcccatcctgcccctgagcccatggcactctatgttctaagaagtgaaaatcta

SEQ ID NO: 228 - DNA, 3102 bp, Homo sapiens
  misc_feature: Incyte ID No: 346673.1
ggcattcgggcacctgttttgatacagggaggaagtcccgaaggccatctgacttttttaagctgtcttttttccttttcatttttgtattcttcctgccccaaataaagtaaaagaacatctcagaaattcatccagaagggacctgccagaataatctgagctggtgtagggaggccttcattcttggcttccctcccctttgaaagggacggggaaaggaaatagtgtcatgtggcctgggcctgccccatgcactgggctgtgagaacctgactcctatgttggaagttaagtaattggtttctctggtaaatctgggacagatctcgaggaatttcgaagctacctggagaagcgttttgactttgagcaagttactgtgaaaaaattcaggacttgggctgagcggcggcaattcaatcgggaaatgaagcggaagcaggcggagtccgagaggcccatcttgccagccaatcagaagctcattactttatcagtgcaagatgcacccacaaagaaagagtttgttattaaccccaacgggaaatccgaggtctgcatcctgcacgagtacatgcagcgtgtcctcaaggtccgccctgtctataatttctttgaatgtgagaacccaagtgagccttttggtgcctcggtgaccattgatggtgtgacttacggatctggaactgcaagcagcaaaaaacttgcgaagaataaagctgcccgagctacactggaaatcctcatccctgactttgttaaacagacctctgaagagaagcccaaagacagtgaagaactcgagtattttaaccacatcagcatcgaggactcgcgggtctacgagctgaccagcaaggctgggctgttgtctccatatcagatcctccacgagtgccttaaaagaaaccatgggatgggtgacacgtctatcaagtttgaagtggttcctgggaaaaaccagaagagtgaatacgtcatggcgtgtggcaagcacacagtgcgcgggtggtgtaagaacaagagagttggaaagcagttagcctcacagaagatccttcagctgctgcacccacatgtcaagaactgggggtctttactgcgcatgtatggccgtgagagcagcaagatggtcaagcaggagacatcggacaagagtgtgattgagctgcagcagtatgccaagaagaacaagcccaacctgcacatcctcagcaagctccaagaggagatgaagaggctagctgaggaaagggaggagactcgaaagaagcccaagatgtccattgtggcgtccgcccagcctggcggtgagcccctgtgcaccgtggacgtgtgagggaggtggcacgggccagggcgcgggggccgccagccgcacttctgaggagaccagcagtcatgcatcgtgcaccacagtgtcaggcctccaacccacgctccttccctgtggccaacctgtgggcccggccttagggtggaggctttagtgtacagggacagccatggccacacagcacacatgtggagcagcggctctccctggaaagctccaggcctgaatggatggactcagcgactgcaccagtggcagctggtgactgtggacagtggtggaccctgcttctgtgcacctgctgcaggctctttttatgaaggctttcatgaattttagtatgtaatacgcactgacgacacatgatgcttggatgacagatgagaggggatggctgagtcctgtggctggcccgtgatgccaggtggcccatgtgcccagggcgcctgcagggctgctacagggacctggtcaggaggtgcacatggtgccctgccctcacccaccctctgtgtttccccttctttgaaaaggtagaagagaaaggaatattttaaacctttttggcttaaacagaattttagcatcagaactagctttctgggattggaggcaaaccatcaaggtggtccctctccagtctggacacgatgccagcaaggatgacgtcctgccacctcctggagttaccctggcctcctagggtccctttttctgatgaagtcttaattccctaaaagcgcctctttggacactgaggccctctctgcctttcctgggcctccggcaacagttttttacaaagattttttgcagtcgagtccatatgtccacccattgatttttaaagcttttgtgatattttagcattttgaaagactttcacagtgagagtagaaggtagatttggaatcatgcattttagcaagtggacttgttgaaacaggaagcaagggccttcagtgtagcccattcttgatccagagctgttgcctgtgacagcggtttctctggatgtcaaaggcagctgcctggtgcccagcttgcttctcgactggtggcccctatgggtgggtgtgcgatggaaatgtgttcctgccggagtctgaggcaccagggtgtgctcaaaggctggccctggtggtggactggcacctgtgcagagtgccgtgtgcttgtggtgcgccatctgaagcaagagtccagcgttctgccgtgtctgtcccccaccatgccccctacaggcggtactgatggcgcttttttttttttttctgtcaggaaaacaatgttggcctgtgggccgcccacaacatatccttccctcactacctgtgtgaccaaggttggcttctgttgacctttaaaaaagaaaccctcaactcaaattgctataattagacacttgcttctgtcttgcctcctgtctgcagctgtgaatagtcatttgactgtgactgttgcccttagccagccagatgcgcctgtgaaccaaagcttcgtgcacatgtgttcccctaaaggttggggagcctcgctgtgtcttgctgttcccaggcaccaccacagcaggtgctgccatactcttgtggtctctgtgcgccccccccccccaacccgtctgccaagcatgggtatgaatcgtgcacacagccatgcttcaaggccggggcaggggagcctgtgctgatgccatccagggcactgggctgtgcctggaaggcgagccttgattgtctgaacacataaagcaaactgtccag

SEQ ID NO: 229 - DNA, 1936 bp, Homo sapiens
  misc_feature: Incyte ID No: 058775.1
ctcggaattcggctcgagacgggtcatgagcccggtattactgctggccctcctggggttcatcctcccactgccaggagtgcaggcgctggctctgccagtttgggacagttcagcatgtgtggaaggtgtccgacctgccccggcaatggacccctaagaacaccagctgcgacagcggcttggggtgccaggacacgttgatgctcattgagagcggaccccaagtgagcctggtgctctccaagggctgcacggaggccaaggaccaggagccccgcgtcactgagcaccggatgggccccggcctctccctgatctcctacaccttcgtgtgccgccaggaggacttctgcaacaacctcgttaactccctcccgctttgggccccacagcccccagcagacccaggatccttgaggtgcccagtctgcttgtctatggaaggctgtctggaggggacaacagaagagatctgccccaaggggaccacacactgttatgatggcctcctcaggctcaggggaggaggcatcttctccaatctgagagtccagggatgcatgccccagccaggttgcaacctgctcaatgggacacaggaaattgggcccgtgggtatgactgagaactgcaataggaaagattttctgacctgtcatcgggggaccaccattatgacacacggaaacttggctcaagaacccactgattggaccacatcgaataccgagatgtgcgaggtggggcaggtgtgtcaggagacgctgctgctcatagatgtaggactcacatcaaccctggtggggacaaaaggctgcagcactgttggggctcaaaattcccagaagaccaccatccactcagcccctcctggggtgcttgtggcctcctatacccacttctgctcctcggacctgtgcaatagtgccagcagcagcagcgttctgctgaactccctccctcctcaagctgcccctgtcccaggagaccggcagtgtcctacctgtgtgcagccccttggaacctgttcaagtggctccccccgaatgacctgccccaggggcgccactcattgttatgatgggtacattcatctctcaggaggtgggctgtccaccaaaatgagcattcagggctgcgtggcccaaccttccagcttcttgttgaaccacaccagacaaatcgggatcttctctgcgcgtgagaagcgtgatgtgcagcctcctgcctctcagcatgagggaggtggggctgagggcctggagtctctcacttggggggtggggctggcactggccccagcgctgtggtggggagtggtttgcccttcctgctaactctattacccccacgattcttcaccgctgctgaccacccacactcaacctccctctgacctcataacctaatggccttggacaccagattctttcccattctgtccatgaatcatcttccccacacacaatcattcatatctattcacctaacagcaacactggggagagcctggagcatccggacttgccctatgggagaggggacgctggaggagtggctgcatgtatctgataatacagaccctgtcctttctcccagtgctgggatttctccatgtgagggggcagcaggacacccagggatctagcgtgggggaggagaggagcctaatgagaaaatgaccatctaaagcctgcccttcattggtctggttcacgtctccaaaccagcttggatggtagcagagacttcagggtgctccagccaaacgtatttgggcatcaccatgacctgggaggggaagatgcactgagacgtatgaggcttccagcctagcagccagggccctagcacaaacaggaggctcgccccatctgagcaactgcaggagaggttagtacagtcatgcattgcttaacgacagggacgtgtc

SEQ ID NO: 230 - DNA, 3245 bp, Homo sapiens
  misc_feature: Incyte ID No: 197086.1
gacgagcatatgcagctgaacagatggaaggatttgaactgcagaccaagcagctgacccgtgaggtggaggagctgaaaagtgaactgcaggccattcgagatgagaagaatcagccagatccccggctgcaagaacttcaggaagaggctgcccgccttaagagccatttccaggctcagttacagcaggaaatgagaaagacagctcttgcagaggatcaactccgtcagcaatctcaggtagaagaacagagggtggcagccttggagaatcaaatatccgaggtgtctgagctgctaggcacctacgagaaagccaagcagaaggaccagctggccattcagaagctgaaggagcgcattctgcagctggacctggagaacaagacactggctctagcagcctccagcaggtcccctttagacagccatggagaggagtccagtctggatgtcaatgtcctgaaagataagatggagaagctgaagaggctgctgcaggttgcggccaggaaaagccaggtgaccctggatgtggagaagctctgtgacctggagataatgcccagctcggaggctgctgatggggagaaggctactgcactctattaccaacaggagctgaaacagctgaaggaagagtttgagaggtacaagatgagagcccaggttgtcctcaaaagcaagaataccaaagatggtaacctgggaaaggagctggaggcagcccaggaacagcttgcagagctgaaggagaagtatatttccctgcggctctcctgcgaggagctggagcaccaacaccagcaggaggctgatgactggaagcaggagctggcccggctgcagcagctccaccggcaggagctggagcggtgccagctggacttcagggaccgcacactgaaactggaggaggagctgcacaagcagcgggatcgtgccctagctgtgctcaccgagaaggacttggaactggagcaactgcgttctgtggccttggcctctgggctgccaggacgcagaagtcctgtgggtggtggcggtcctggggagccagctgacacatcatcctctgatagcctgacccaagcattacaacttgcagcggccaatgagcccactttctttctgtacgctgagcaactggcccgcaaggaggtggagatcacatcactgaggaagcagaagcacaggctggaggtcgaggtgcatcagctgcaggatcggctgctggaggagggcgaacggcatcgtgaggaggttgcagccctgcagagccacatcgaaaagaacatcagggaccagagcagggagggagccaatctggagtacctcaaaaacatcatctaccggttcctgaccttacctgactccctgggccgccagcagactctcacagccatactgactatcgcgcacttcagtccagaggagaaacaagtgataatgcgactcccaaccagtgccagctggtggccttctggcaagagatgatgccattttcatgaattcctggaatttctgtgcctcttttatgtgggaaagggcaggctctggtttctgctgcctcttctcttacattgtcatttatttcttcactgtgttgagctgggaggagtcttcaatgtgggaagggattttctgccaaatgccattaatgctgctttatccttaggccctagagatactgaaagtcctggggcagtatcttctgatggtgtgcatgtgaggagaagatgaggttaggactgagaagtgcagaagttggaacagtggtaaggctgttttaaaataagatgttttgttttaataatatgctcctggcacaaagctaggagtaaatgtgactccaaagggagttcagttaatctctgaaatgcacaaaacctagctattttctccctctcatcacagtctgagtctggtccattgctaccccaattctctggggacataaaaccaggctggaaagggaccaggaagtttgaaatagtgacatatcatccactagtcccaagggctaaggaatagtgagtttattctggaaggaactgggaagcttagtctaattagtgcctggggatgacctatgcaatcacaccgcttatgaccatcctagagagggccctgagcaccagcttgatcttagggatttccaaagtaacctgctttttgcctggatagggttaaaatagacctttcttgcctatccttgccttaacctatctgcctgaggttggcctgagattgtgagtcaacgactttgctatcttttcctcagtgttgaactttcattaagaaataaagtcctagcttcttacagagaggggtccaaatggtgaatgctcatcctgcctggattcaaggaattagctcagagattggcccctagcttttctgcctttgtagggacagcaaaaggggaaagtttgctgcagaaaattccaaaagattgctgtagctctcacagggaagtggtaaagatcagctaaacctgggttggggtgctttctgcccagtgggtcttggcataagtagattaatcctgctcttttaagaaaaggcaacttattcaggcagtctggaaagggggttctcagaaaactcagtttctttattccttcttttctcccaactactgttactggttatagaggtctttggactctaaagaccaatgtttggccactaactggactaatatgtatctttctgtgatttcatcatagaggtctgttttgtgagggtttggggtgcagaaaactttgattaaatcttaatgggaggctgggtgacctggattatctacagtgagcagacttaaatggaacagaagtttatgtgtccaaatgatggaatcattaaacctgagtgacttgacctgtgtggttccttaatagtatctatatatctagacaaaaatagattgtgaatgtaaatggtgaatgaaaaggatggaaataatgttttcatatgttaatccatgagcttgaatccagggaggaatacctcggtgctttaaccaccttagttataacacatttcttagcctggaattgtgtgtgtatatgtttgtgtgtggccacctatgctggaaaatgctttcttatgggtttagtgggcaggcttaaaacttccataattacacttcaacctctataagtaatctgtttatgaatgctttattatccttaaaatcaggattcatagtatcccgaaaaagtgtctcaggacatcaag

SEQ ID NO: 231 - DNA, 5171 bp, Homo sapiens
  misc_feature: Incyte ID No: 348143.7
  unsure 2847-2869: a, t, c, g, or other
ccgacccggcgccattttggtggccgggcgcggaggtgattccacactgaggcgagcgcggcggccggggtggtagtggcagtgttcgtgtgctcaggtctgaatcgccgagggaggaggcggtggaggaagaggtggcggcggtggcggtggtcgtagcggtggcggaggaggcgggtacgaatcagctgcgggcggagacatggccaacatcgcggtgcagcgaatcaagcgggagttcaaggaggtgctgaagagcgaggagacgagcaaaaatcaaattaaagtagatcttgtagatgagaattttacagaattaagaggagaaatagcaggacctccagacacaccatatgaaggaggaagataccaactagagataaaaataccagaaacatacccatttaatccccctaaggtccggtttatcactaaaatatggcatcctaatattagttccgtcacaggggctatttgtttggatatcctgaaagatcaatgggcagctgcaatgactctccgcacggtattattgtcattgcaagcactattggcagctgcagagccagatgatccacaggatgctgtagtagcaaatcagtacaaacaaaatcccgaaatgttcaaacagacagctcgactttgggcacatgtgtatgctggagcaccagtttctagtccagaatacaccaaaaaaatagaaaacctatgtgctatgggctttgataggaatgcagtaatagtggccttgtcttcaaaatcatgggatgtagagactgcaacagaattgcttctgagtaactgaggcatagagagctgctgatatagtcaagcttgcctcttcttgaggagcaccaacatctgttatttttaggattctgcatagatttcttttaaactggcattcttgcctaatgatgttatctaggcaccattggagactgaaaaaaaaaaaatccctgctctgtaaataaagctaattaaacgtctgtgtaaatttaaaaaggggaaatactttaattttttttcttaatagtgtaaaaattccctgagctaagctaaaaccatggaagaaacatgctactttagtgtttagcagtgtaccaagactagcaagagtttgcttcaggattttgttgaataattaagataatattttgagtgtgtcagggccattcaaattgttggtgttgcatcacagctaccttaactgtttttaacatggatcctctgtgcctgtgaatttacttgcatgcttgtacttgacttcttaggatgggtagctgaaaagaccaccattttaagcatttgagaattcttaaatatgaaatttattcagaattgaagatggtgacctattcagagcctttttgtccttgtcaacagactgggacagtgtctgattcccccttcacccccccccacccccgccttgccacacacagctaatattctaatggtaaatttctctgtatcaggtggggaaatgtgctgaaggacagtatgtatcccttgcttcatttttaggtcgtaggtttggaatgtcttgtcccagttcttcaaacactcttaaatttttcttaagtaatgtaaaaatggaactgccaattttatttctcttgcaaaaatagtaaatacttgatgttacattattcccaggtttaatgaaagaacccaacttagtttttcagtgaatttgacacctattttttagtgatgaaatttttctttgagaactggcaaggatgcagtcagctgtttgcagtttttagcctgattttggggtctatagagattgctttattggatacttcaagtcattcttgcttgcacttcccctattgacacatgaaagctgtgttggtgttttattgtacatacttcagatgcacataggaatagaagtgtgttataaatctagctttctttatgatgtttctgataatacgagaattgaaaactttaccttctcttgtacatagtcagactatttgtattaaatttacatttcattctaagttcaaaagtttgaaaattattagttttgcaagatcacacactaatgtaaccattttatgaaggttgaagtggatttatgcaggcagttctatatatagaaatacaattctttttaaatttttaggaccaatacaaaataacaaaaatgtaatggaatcagactgaattaaagtaaggctgtatattgaaagtcatattataaaaggtttgctttctttaagtgttatttatcttaaattataatcgttaaatgtttggaagataatttttgaatcataacgtcagcataacttcatttgacttctcaataatcttgatactagaagcaataaaagaaccattattaaatatattgtaatgttaaagatgtgaaggttcttccaaaaatttgtaaggctttcctaattaacagtaaactcttatagctgatattattacatactaaacacaagttgctgttttttccccatatgtttgcttacgcatgtctttatacaatcacctctttttattgctgtagtttattttctaaagatgccaaaggaaacaagatttttctttatttattttaaatacctgaaacctcgtactttatattttgaagtaaggtgggattgtgtgaaaatgtggatggtttttctccagtgttggttagaactactttttttaagtggagggcaacttggtagtattagtagaatttgggtttaaaaatatcagacacatctacccagtttattttttgcctgtattatcagggtatatttaattgtcctgtggttaaacaaaggtgagagagctcagaggtttctaaaggtcaagcatttnnnnnnnnnnnnnnnnnnnnnnntcttggaggcagctatatcctgctttgatttttatgcacatgagccctatagggttatatactcatctaactacacttcagcatccccagtgcccaagaaattggaaagtacaatatttggtttgagacattcttcataaaagattctttattataaaaatttacctcatttacatttaatgtgatgatcttttttttcctttctggtatatttcccactgtactgtttggtttttgttattctcttgtctgtgggtagatttagttacccaaacatagaaactaaagcaattgcttttttcctctggtcttaaatatgtttggacaaaaagacactaaaaggtcaggcctaggggaaaagtaccctggtggaaattatttttgtaattcttaatatttttgagttggctccgtttgtcagttttaaaagcctcaaaaattatgttaaaaaaaaaatccagtgaaatcccatttagggcaggccgatttgttagaagtcactgatgctccagtaggcttttgttataatcaggcctgtttcctgagtatgtgcctcttttaaaagaagaaataattagctgtatagtatttcagtactgatgaatgaatgaatgaatgaatgggcagttagtgggcccaaataagtattcagtggtatataaatatttgaggaactaggtactgaattaggtgctctgagttggcaccccgaaatgtttggaatcacgactatgatttacttaaacacgtaacacattcaaggatatataaatggagtctaagtattttgcttttgaagagaataatctatgaaatggaagacttgattttttttttcattttttagaagtaatacacatttatgattgttggcacataaaactatgcaaaataattctttttaagtatctgtaagaaagaattggcagtttaaacggattttgcttatttatgcactaccgaatgcagcatactgtattactgttgaggctgcttaataagtttaccaatgtgaaaagcagatcttgggtataagtgtatgcctgatttgagcttttaaaactgtgcagtaggtgtatggtaatgttttacaatcctatgtagcaaaataggaaattatgaatttttgttgttattgttttaaagatttaagatggattggggtagggaacagctggagccaggtataccttctagtatgtagagggaaacaatgtttagataggaaaaaggaagccgtctgtttacagttaactttatttcatggacttctacaaaatgttgtattaatcactttttctagttcaaggaatttcaattccagggtacaaaccattgatttaaaaattacgtttccattctttttagtatcagtttaaagtaaatgcttaccatcagccagttgctgtcactgggaagaaggcaacttgaagtatttactgataaaatagcctttattcccaagtgtgacttttcttcagtgtctacatattatgtcacacgttctatttgcactgctgcaatatagatcaaagatcttgtggcataggggtaggggagtgttagtatctcccttgtcccatttgttctgttactgcttcattggactgatataccctcatgaacttgcaatcacctaaatggaagtcttgaatgtgtcaccttttgcttggttatttcaaccatgctgctatatataatcaggtgtggcacagtttgtcagtttgattataggtgtgagtggatagaaatcattacactgtgctgttaacgatccttgtctgcttgctgttacctactttttacaggcatcataataaaagctagactatttctttggggggaaagagacttatttaatgtaatttaaaaaacttttccaatagaaaatgaaatattattgaaaataatatctattttttagctttcagcaattgatggtgctttgttgtggtgtctgctggaagtctactgccattatagggaaccttgcttgttagcttctctagatctctattctaaacaatctgttagtgatgataaattctgtaggagggtctattctgagccgttaacttcctgtaaggggaaaatgggtgggttaccagaaataccattgaagcagggtgggctgtggggtggaaggttggggtatttgtcttgagaattaaaaactacgaaacacttttgtacacaactgattttttaaaaaataaacacatttttaaagatgttgaatttttccccccttattgggaattcttaaaaataaatgcatgcatgttttcccctgaaaatggtt

SEQ ID NO: 232 - DNA, 1042 bp, Homo sapiens
  misc_feature: Incyte ID No: 239552.3c
  unsure 974: a, t, c, g, or other
gcagaggagagatcggcttctttattacagccagggcccctctggccggagcgggggcaggggcggggccgtgggaggtgggtgcggagcgccggaggtgtggagggcggggctgggctccatgggaggtcacaggcccccctaggctggccccggtcccgggttgttgagaacaccatcgatccagtctcggaagagcgccactcgggtgaagaagtcagggcctcggccacagggccccagggaaaaggaggccacgccgtgggccaggccctcgcagacgaggggggtgcccccgtccccattgcagatgccaccgcggcgggtgagcacaccggtgcacacgttgttggggcgacactggtcctcgggggtcacagtcacgttgacgaacctgggaaaacgggagagacgccccccactgcgctggctcccccagccggccacctggcatctggtgccggcttccaccgtggcgttctgcagaggcagtggcagtatcgtcacgctgctggtgaggttggcctcacggtccagctgaagcagcatcaggtcgttcaggttctgctgggggtcgtagccattctcgctcatgctgctgatggaaaacgtctggcgggactgcctctcccgccgcctcaggtcataggcacccagcaccacggtgctaaccccagggttctggctttggaagcagctggccgcggtcatcacgaagcgggcatggatcagggcacccccgcagaagtgcctgccttgattctgaatggaggccaggaacgggaactggcggggcctcgccttccggccgccaacgatgtccaaaagggggctgggagccggccctcgaggacgccagcagaccagccagcagggccaggactgtcagccgggtcatggcggggcaggtctgtggctaaggcggcggctgcccttatacacaggccttggcagttggtggcgtccccgcccangcccagggacagccccactcagtgggaacacgggaaattgcccaaggcctccaccgccaactgctccc

SEQ ID NO: 233 - DNA, 4316 bp, Homo sapiens
  misc_feature: Incyte ID No: 233003.6
  unsure 3967: a, t, c, g, or other
cacctttaacgtccgcgggcgcggggtgtgtcgggtgtcgacggcggcgctttgcggccggtcgtgcgggtcgggcgcgggcgggcgcgggcggcagtggcgcgcacaggtgattgactggccagctgcctgaaggagcgccaggtcctccttgctggcaggtggcgaagcccattggggcggcggtgcagaccgcgggggcggcttgcggcggtctggctcgggaggcgttcctggggccaaggccatggccccgcggctgcagctggagaaggcggcctggcgctgggcggagacggtgcggcccgaggaggtgtcgcaggagcatatcgagaccgcttaccgcatctggctggagccctgcattcgcggcgtgtgcagacgaaactgcaaaggaaatccgaattgcttggttggtattggtgagcatatttggttaggagaaatagatgaaaatagttttcataacatcgatgatcccaactgtgagaggagaaaaaagaactcatttgtgggcctgactaaccttggagccacttgttatgtcaacacatttcttcaagtgtggtttctcaacttggagcttcggcaggcactctacttatgtccaagcacttgtagtgactacatgctgggagacggcatccaagaagaaaaagattatgagcctcaaacaatttgtgagcatctccagtacttgtttgccttgttgcaaaacagtaataggcgatacattgatccatcaggatttgttaaagccttgggcctggacactggacaacagcaggatgctcaagaattttcaaagctctttatgtctctattggaagatactttgtctaaacaaaagaatccagatgtgcgcaatattgttcaacagcagttctgtggagaatatgcctatgtaactgtttgcaaccagtgtggcagagagtctaagcttttgtcaaaattttatgagctggagttaaatatccaaggccacaaacagttaacagattgtatctcggaatttttgaaggaagaaaaattagaaggagacaatcgctatttttgcgagaactgtcaaagcaaacagaatgcaacaagaaagattcgacttcttagccttccttgcactctgaacttgcagctaatgcgttttgtctttgacaggcaaactggacataagaaaaagctgaatacctacattggcttctcagaaattttggatatggagccttatgtggaacataaaggtgggtcctacgtgtatgaactcagcgcagtcctcatacacagaggagtgagtgcttattctggccactacatcgcccacgtgaaagatccacagtctggtgaatggtataagtttaatgatgaagacatagaaaagatggaggggaagaaattacaactagggattgaggaagatctagcagaaccttctaagtctcagacacgtaaacccaagtgtggcaaaggaactcattgctctcgaaatgcatatatgttggtttatagactgcaaactcaagaaaagcccaacactactgttcaagttccagcctttcttcaagagctggtagatcgggataattccaaatttgaggagtggtgtattgaaatggctgagatgcgtaagcaaagtgtggataaaggaaaagcaaaacacgaagaggttaaggagctgtaccaaaggttacctgctggagctgagccctatgagtttgtctctctggaatggctgcaaaagtggttggatgaatcaacacctaccaaacctattgataatcacgcttgcctgtgttcccatgacaagcttcacccggataaaatatcaattatgaagaggatatctgaatatgcagctgacattttctatagtagatatggaggaggtccaagactaactgtgaaagccctgtgtaaggaatgtgtagtagaacgttgtcgcatattgcgtctgaagaaccaactaaatgaagattataaaactgttaataatctgctgaaagcagcagtaaagggcagcgatggattttgggtggggaagtcctccttgcggagttggcgccagctagctcttgaacagctggatgagcaagatggtgatgcagaacaaagcaacggaaagatgaacggtagcaccttaaataaagatgaatcaaaggaagaaagaaaagaagaggaggaattaaattttaatgaagatattctgtgtccacatggtgagttatgcatatctgaaaatgaaagaaggcttgtttctaaagaggcttggagcaaactgcagcagtactttccaaaggctcctgagtttccaagttacaaagagtgctgttcacagtgcaagattttagaaagagaaggggaagaaaatgaagccttacataagatgattgcaaacgagcaaaagacttctctcccaaatttgttccaggataaaaacagaccgtgtctcagtaactggccagaggatacggatgtcctctacatcgtgtctcagttctttgtagaagagtggcggaaatttgttagaaagcctacaagatgcagccctgtgtcatcagttgggaacagtgctcttttgtgtccccacgggggcctcatgtttacatttgcttccatgaccaaagaagattctaaacttatagctctcatatggcccagtgagtggcaaatgatacaaaagctctttgttgtggatcatgtaattaaaatcacgagaattgaagtgggagatgtaaacccttcagaaacacagtatatttctgagcccaaactctgtccagaatgcagagaaggcttattgtgtcagcagcagagggacctgcgtgaatacactcaagccaccatctatgtccataaagttgtggataataaaaaggtgatgaaggattcggctccggaactgaatgtgagtagttctgaaacagaggaggacaaggaagaagctaaaccagatggagaaaaagatccagattttaatcaaatcatgcatgcattttcagttgctccttttgaccagaatttgtcaattgatggaaagattttaagtgatgactgtgccaccctaggcacccttggcgtcattcctgaatctgtcattttattgaaggctgatgaaccaattgcagattatgctgcaatggatgatgtcatgcaagtttgtatgccagaagaagggtttaaaggtactggtcttcttggacattaatctttgaatacttgctgactgctaagaaatgaccagaggggaagaggagtttgacatgttagggcattaaagcaaaggtggatttaagaattaaaccattacatgccccttccaaaaggcagaaatccattcaaacgtgactgtcccaaatgccttatgtcaaataaagcagattgcactgatggacatcagacttgaaggaaatgtttccaattttatatttaaggggggtggtgggtgggagggggcaagtaaagacggaacaagtttagtagcagtaatagtaaatcatgtttacatatgagatttatagtcgtgggaggggaataaagttctgttatatttccttgctcgagtttcataccagatgcgttggtccataaaggattgtatcaagtagatgggacaacattctgctctgaacgaaaagtaattttagagacataacctgcttaccaatgcctgtctttgattcatattctactttcaataaagcatgaaagtgaagaacttgtcctaagtgtggaaaagtgtcttcagatttagactcttctccatgtcagctgcagcgccacccgccttacacctgcccggccgtctgtctcttggtattgggtaaaggagggggcacctgcatgtctcctgcaatgagcaaggaattatgtctcatgttttgacttcagaggctttttgctttggtgcatttcagaaaggatggagaacatttattatgtgtgaaagcatcctcttcaggttttgctgttattnaaaagtgggaaatgtacctggcacgtttgaaaataaaaaatctgactacctatcagaagagtaaatcagactgaagtacatttggataacacaaggtttctataaaatttgttattcctgtcctccatgtcactgtttcttggacctcagttctctttttgaaagcattattccaaaatgccctgagagggtctcttagatcattgtttaaaaaaggaaaaaagtatatggatgtgctgtccatccaactcaggattatcattcttagcaacacgtaaccgaagcaatattcttaagaatattgaaggggtttttttaattgaacttaagactggagtttttcctttga

SEQ ID NO: 234 - DNA, 717 bp, Homo sapiens
  misc_feature: Incyte ID No: 233003.20
  unsure 564, 622, 669, 677, 700: a, t, c, g, or other
tttcttcaagagctggtagatcgggataattccaaatttgaggagtggtgtattgaaatggctgagatacgtaagcaaagtgtggataaaggaaaagcaaaacacgaagagttaaggagctgtaccaaaggttacctgctggagctgagccctatgagtttgtctctctggaatggctgcaaaagtggttggatgaatcaacacctaccaaacctattgataatcacgcttgcctgtgttcccatgacaagcttcacccggataaaatatcaattatgaagaggatatctgaatatgcagctgacattttctatagtagatatggaggaggtccaagactaactgtgaaagccctgtgtaaggaatgtgtagtagaacgttgtcgcatattgcgtctgaagaaccaactaaatgaagattataaaactgttaataatctgctgaaagcagcagtaaagggcgatggattttgggtggggaagtcctccttgcggagttggcgccagctagctcttgaacagctggatgagcaagatggtgatgcagaacaaagcaacggaaagntgaacggtagcaccttaaataaagatgaatcaaaggaagaaagaaaagaagaggaggnattaaattttaatgaagatattctgtgtccacatggtgagttatgcntatctganaatgaaagaaggcttgtttctanagaggcttggagcaaac

SEQ ID NO: 235 - DNA, 4116 bp, Homo sapiens
  misc_feature: Incyte ID No: 217860.1
ggcgccgactcacgcacccctcggcgcctctcgcgcggttcccgcgccggcagcccgcgatggccccacgtgaccgcgtgtctgcacagtccctggcagagccagagcctctccgcgcagcccagcccgagcgccgagcgccgcgcgccgccgccactgcagctcgcggccccttcgccttcgcccgcctttcccgcggctgatttgccttaaactccctaaaatctccgcagctctggttcctgttgcggccgtgccctctggtggtcagaagatgctgtgctgtctcgtaaggatgaagtggattaaaatgtacttttcctcctctgcttctggagagggagagaggaatattccagaagccactgtgttccttctgctttctgtgtggcatgatgccttcttctgtagagtgggcgctttgcagaatacgtgttgaatgaaatcactgatctaggaaaagtaaaaattcctcaaatgaatacagaatacttgtgctactgctgatgatcaacactttatacagtgcctggtataccaaaggtctctaattaacagaagatggcaaagcccagccacagcagctatgtccttcagcagctaaacaaccaaagagaatggggttttctctgtgactgctgtattgcaattgatgacatttactttcaagcacacaaggcagttctagctgcctgtagctcctattttagaatgtttttcatgaaccatcagcatagtactgcacaactgaatctcagcaacatgaaaattagtgcagaatgttttgatctcattttgcagtttatgtatttaggaaaaattatgacagctccctccagttttgagcagtttaaagtggcaatgaactacctacagctatacaatgttcctgactgtttagaagacatccaggatgcagattgttctagttcaaaatgttcctcttctgcttccagcaaacagaacagcaaaatgatatttggggtaagaatgtatgaagatactgtggctcgaaatggcaatgaagccaacaggtggtgtgcagagccaagttcaacggtaaatacaccacataatagagaggctgatgaagagtctttacaattaggtaattttcctgagccactatttgatgtatgtaaaaaaagttccgtgtccaaattatctactccaaaagaacgtgtgtcaagacgctttgggcggagttttacctgtgatagctgtggatttggctttagctgtgaaaaattattagatgagcatgtgctaacctgtactaacagacatttataccaaaacacaagatcttaccatagaatagtagatattagagatggaaaagacagtaacatcaaagctgaatttggtgaaaaagattcttccaaaacattttctgcacagacggacaaatacagaggagacacaagccaggctgctgatgattcagcttcaaccactggaagcagaaaaagtagcacagtggagtctgaaatagcaagcgaagagaaaagcagagctgctgagaggaaaaggattattattaagatggagccagaagatattcctacagatgaactgaaagactttaacattattaaagttactgataaagactgtaatgaatccactgacaatgatgaattagaagatgaacctgaagagccattttatagatactatgttgaagaagatgtcagcataaaaaaaagtggtaggaaaactctaaaacctcgaatgtcagtaagtgctgatgaaagaggtggtttagagaatatgaggccccctaacaacagcagtccagtacaagaggatgctgaaaatgcatcttgtgagctgtgtggacttacaataaccgaggaggacctgtcatctcattacttagccaaacacattgaaaatatctgtgcatgtggtaaatgtggacaaatacttgtaaagggtaggcagcttcaggaacatgctcaacgatgtggcgagccccaagatctgaccatgaatgggttaggaaatactgaggagaaaatggacttggaagagaatcctgatgagcagtccgaaataagagatatgtttgttgaaatgctggatgattttagggacaatcattaccagataaacagtatccaaaaaaagcagttatttaaacattctgcctgcccttttcgatgtcctaattgtggccagcgttttgaaactgaaaatctagtggttgaacatatgtctagctgcttagatcaagatatgtttaagagtgccatcatggaagaaaatgaaagagatcacagacgaaagcatttttgtaatctgtgtggaaaaggattttatcagcggtgtcacttaagagaacactatactgttcatactaaggaaaaacagtttgtttgtcaaacatgtggaaagcagtttttaagagagcgtcagttgcgactgcacaatgatatgcacaaaggcatggccaggtatgtctgttccatttgtgatcaaggaaacttcagaaaacatgaccatgtacggcatatgatttctcatttatctgctggtgagactatatgccaggtctgctttcagatattcccaaataatgaacagttggagcagcacatggatgttcatctgtatacatgtggaatatgtggagcaaaatttaatttgaggaaagatatgagatcacattataatgccaagcatttgaaaagaacctgagtgattttctactgtactaatgtttagatgatagcagataaaacaccaaagcaaaggatatgagctatttaggaattgattatataagatgatttgttagaaacaaatttcaaggcccttttaactttaatatttttgtttaggattttaagtatctacatttaggtattaaatgtttatcatttttgttgtttcttaatagaattatttgtttttagtttttcttagctatgattaaaatttttaaatgtagactacaagtggttgttacccattcaatgactattaaactttagtttttcatcaataaggtgatgacttcactatttctatgtgtttttttttttttaaggttatcctgtgaaattttaaacccagaatcattggccatttctgtttaaattttaaaaattccttaagtaattatttgaaactatcccgtttgcttttagtgagttaactactctttattcccccttattaatgaaattcatattcttaaattgacaagcttattaggcaagttaggtgcactgaatctaacctttaaggttgacatgggctcaaacttggcctaaaaagattgatgaacctgaggaaatttttataaatgaatatttcctataattgataaaatattatcatttaattatcacatttaaaacttatattaagtgtaaattccagtggctttacctcacttgaaaaattagtggggataagccattttgttttgtgatattaaatttaactatgatagttaattaaaaagacatatcttgtattcattaaaaatattttaatttaaaatattctgatttctaaagtgtgttagcttatcaattatttttgtttataaatagactttaatagctctctaagaatatgacctctaaaggaaaagatgattttttacaatacatacttctggaactttgagatttgagaaagcttccatgtatattgataaatctaataaaataaagagatcaattataaacctggttgttctataaaagtagagtgcacaaaaaaatgtcttgtgttttatactgtctaagatttggaggaaatgtggcaaattgcagtttatcgccatattttattatcatttttttctgtaaaagactataaaacttgaggattataaaataatcacagagtatatcaatggaaacagtttatcattttttcagttaaagtagtagtattgttagttgttgctgacacagggtctacataattacatgtgaattaaaacattggcaaaactgacccaccaataaacacatctattgaatagaatgccttttaatgtgaattacttgcaatgtagtacccttttcataatgaaagggattttaattaactcctaattttaaaaatataaatttgtgattctgaacactaaaa

SEQ ID NO: 236 - DNA, 2304 bp, Homo sapiens
  misc_feature: Incyte ID No: 216189.2
  unsure 372-404: a, t, c, g, or other
gaagctctggcccggcgtgtagcgggcgcactacggggacgctgggccgggcaccgggctgtgtggagaagtgagcgcgctcgtctgacccccgtgcccgccaccccgagccactaacggcgatctcccaaggcctgcccgaggcctctgtcctctgtcctcagccccgcagcggcaacgtcttgcactcggcgagctcgccgctcccgaccctcccgcgcccccgccctgccgcgctgctccccgcccagccgcgggtctgtggtccaagccgccccgaagcagcccgaacaagatcactcaaggtgaaggataatctactaataccagcactttgaatgaaaatttgtttctctgccacaaactgaacannnnnnnnnnnnnnnnnnnnnnnnnnnnnnnnnggtgggggagttgaaacctaattttgtggcgtacagctatgcagcttgaaatccaagtagcactaaattttattatttcgtatttgtacaataagcttcccaggagacgtgtcaacatttttggtgaagaacttgaaagacttcttaagaagaaatatgaagggcactggtatcctgaaaagccatacaaaggatcggggtttagatgtatacacataggggagaaagtggacccagtgattgaacaagcatccaaagagagtggtttggacattgatgatgttcgtggcaatctgccacaggatcttagtgtttggatcgacccatttgaggtttcttaccaaattggtgaaaagggaccagtgaaggtgctttacgtggatgataataatgaaaatggatgtgagttggataaggagatcaaaaacagctttaacccagaggcccaggtttttatgcccataagtgacccagcctcatcagtgtccagctctccatcgcctccttttggtcactctgctgctgtaagccctaccttcatgccccggtccactcagcctttaacctttaccactgccacttttgctgccaccaagttcggctctaccaaaatgaagaatagtggccgtagcaacaaggttgcacgtacttctcccatcaacctcggcttgaatgtgaatgacctcttgaagcagaaagccatctcttcctcaatgcactctctgtatgggcttggcttgggtagccagcagcagccacagcaacagcagcagccagcccagccgccaccccccccaccacaaacacagcagcaacaacagcagaaaacctctgctctttctcctaatgccaaggaatttatttttcctaatatgcagggtcaaggtagtagtaccaatggaatgttcccaggtgacagcccccttaacctcagtcctctccagtacagtaatgcctttgatgtgtttgcagcctatggaggcctcaatgagaaatcttttgtagatggcttgaattttagcttaaataacatgcagtattctaaccagcaattccagcctgttatggctaactaaaaaaaagaaaatgtatcgtacaagttaaaatgcacggggcccaagggggattttttttttcacctccttgagaattttttttttaaagcttatagtaaggatacattcaagctgggttaaaaaaataataataaaacatgcatcatttttcatttgccaaccaagcacaaagttattttatactgactgtatattttaaagtatactctcagatatggcctcttacagtatttaagatatagcaaggacatggctgatttttttttataaaaattggcactaataagtgggtttattggtcttttctaattgtataatttaatttagtacaaagtttgtaaaatatcagaggatatatatatattgtttctacgacatggtattgcatttatatctttttactacagtgatctgtgacagcagcagcttcatgttgtattttttttactgaaattgtaaaatatccatcttaaagacatcaactattctaaaaattgtgtacaggatattcctttagtggtggaattaaaatgtacgaatacttgctttttcaaaaaaatgtattttctgttaaaagtttaaagatttttgctatatattatggaagaaaaatgtaatcgtaaatattaattttgtacctatattgtgcaatacttgaaaaaaacggtataaaagtattttgagtcagtgtcttacatgttaagagggactgaaatagtttatattaagtttgtattaaaattctttaaaattaaaaatgcctattgtctttgtttttaagtgttttctgaagatcgacctctggagttattatgttgtaaatg

SEQ ID NO: 237 - DNA, 3926 bp, Homo sapiens
  misc_feature: Incyte ID No: 343692.15c
gtaaaagctagagatttattgttattttatgattaataaattgtcaaattagttatgacactatcccacactgaataccaccatttgccagtacagaagtttttaaaccaaactgaggcataaagcagaaagagcaaagacacatgaatacccttcttaacaatctcttctacttatgcctccaccgtaacctttgtacttgttttcctcctggggaaagtgtcagaacagtgcaaggactggtgggtaacctggcctcttaacctttttaatagcaagcaacatacagaagtaatgcaatcaacttgtatttcccttgattttattggtctgaattcattttaggttactttaacattttaatttcctgtaactgtacatgagagaatataatcacctaagagaatactgaaccagagtcagccaaatgtatcactgaccctcaattatgttttaattggtcctaaaggaatgtaccaccccaacagtttgggagttaggcaaacagaattctttgggggagggaagaaaaaggctataaaacagccaaatgtactcaacatcattaaaacggctctttgtttttcacccctgaatgatacttctttactacactatatgcacagaaatcctaacagaatcttggttgccagtattatttaagctggccccatccaggacagattccgctgccccacccccccaccccgtccccctttctctgaggctctgaaaagcacaatatttaactatttcttaatagaactaccaaaacacttcagaaacaattggctcacaactcattttaaatttgtgtattgcctgtgcatgagaaaacagataaacccaaaagatagttctatttttttatggcgattaaaaataactgaaacatcaagacactttttcagtgaaagcaacatttcaattacaaattttaatgcctgttaaactacctatgggagaagctgagaagtcctaggcaaatgcactttggggtatactacagtgttccttcagtctgcacaaagattaaggtaatttacagtcaatctgtgaatgaatgttgagacaatgttacattatgtgtctgtacaattaattgtccttaaagagataaccagaatcagcttttctactgtattttcaacaaacctgactaaccggcacttttgctgggagatgtttgtcaaagatgctgtaagattctatacaattaggaaatactcagctttaagagtattttcttatcttcacttttttagttacaggtgttttgctcagagagcctattgcagtatgtttccagaaatgcagtcccaaatgtgcatactctatattgtatacaaataaaacaaaattatcagtagtataaatcttacagcattgtttgcaaaaatgcatgccaaagtcacaataagcaatactgtaccacaaattatagagtgcaaatgatttgcttctttttaatgcttttattctacataaattactaccataggctaatgtttaaaaagcaaataaactggacagatgcaggacaaaatctggtcacccaactataaaaggtgatgtttttaaaaaattacaataaatgcagaagtgatgcatgcagtagccttaattcccactgttccagaaaagaaaaatacagaaaaacccacacatcttactgtactccaccttaaaatgcatcatattgggtttgtttataacagcacagaattccaagagtcaaaatgaaataaagcaggtattttaaagtttaagagccgttatcaaaaataaattacattttttcaagatacagaaatgctgctatgatggctgggagcccagtaacctttcaatagctgcattgatatcacctcctgttgctattagagcttgcaagtttgcttcacggttcaaaaatcccattgcactgagttgttccagttgttgctgaaatctgacttctggattctgtagctgaggatttactccagcaagagcctgaagcatctgctgaataaactgctgatgtccaggttcagtggttcctgctgtgggacttgtgttttcactaggtgtggcgttagatccattagttcccgaagagcctccagtgcttcctaatgcccccaagccaggagtaaaccctgggatgaggcccggggcttccgttgctaatgtctgtaaaccctgctgaatctgtaacaaggcctgcattgctctagggtttgacattgctgatagtgtatcaggattctgcatttgttggaggaaagttgggagctgttgtctcatttgttcttgaagctgaggatttccagcaaataggggattattcagcatcatctgtgcagcaaggtcaggattctggcttagtgactgcatcatgcttctcatgtagggggcagacaacatgttttgcataagttgtgggttttcagttatttgttgcaacaagctctgcattcctggtgtgttgaacatactagctcctactccaggcaccaaatttggcgcagtagtactctgcccagaagtgccactggcagtactaccagtagtgccacccacagtgctggcagtgccgctggaagctgatgaactctgggaagtctgtggagcccatggattgggtagtggatctctattttctgtacgggaaggttgactaccttcaccagaggatgtattgctcaccaaggaagcaaatggattaccaccaaactgctcttgtgcagcactcagcattggttcctgaatatctgtgtacatgcgccttaaagcattatatccccctgggatgctttctaggttgctcaaagctcggtcctggttcctcatcatctcctgcatcattgctggattcctggcaagttccaacgtttgtctcattatatctggattattcaacatatgactaatttctggatttctctgtatcaactgctgcatttgtggattggccataattaactgtctcatcaggtcaggatttgagagcatgctctgaacaaagggattttccatgatctggaccatcatttcagggttagacaaaagttgtcgctgcatctgactctgtagttcagagaagttggtagtattcaaacccaagctactcagacctgcaagtcccccaaggccacctaaaccaaaagggttgctagtagcagaaccagatgtagagttactattaggagttgatgatgtagtaacattgcttccagctgtatttgtttgctgagctgaatgatcctgaggcctgttttgtgttttaatgacaaggtgaacagtaagtccatcatgaattccatgctgactcaaggtatcttgatctttcaaaatttttccagcaaatatcaacacaagttggtcagtatgtgatttaaaacgtttagagatttcttccttaaactgctggacggagctattctcgggcacggcgaattcctccttttccttcggggtcttcacggtgactttcatgattttgggctccgcggaggcagcggccgcgggggcgccagcaccttcggctccggcggcgctatcctgggagcccggaggaccgccgctttcaccactctcggccatggctgtggcggcggcggcggcggtgactcaggcaagcaggagggagcaggcgagcaaggaggagccagcagacaccagagccggcaggcctggacagcgaagaatgcagagcacgccgcctcagtagcaacgggcgcagggccaccgtagcgggtgtggggccccggagctcggtgcaggctctggcgcaggcccgggtcaggcgctcggcagccgccgtgtgttcaggcgccgctcgctcacaccgacatccgcagcagccaccgcttcctcctccctgccccttcccccacgtcccttcgccggcgccgcgcggagcacgccgggtaacgcgcctg

SEQ ID NO: 238 - DNA, 505 bp, Homo sapiens
  misc_feature: Incyte ID No: 382906.16
  unsure 484: a, t, c, g, or other
gaagaaacatccaaggtggtcttgaaggacactgggatcctgtaacacagccccggatatctgtgttaccagccttgtctcggccacctcaaggataatcactaaattctgccaaaaggactgaggaacggtgcctggaaaagggcaagaatatcacggcatgggcatgagtagcttgaaactgctgaagtatgtcctgtttttcttcaacttgctcttttgggtgttggggatgtcctttgcactgaccctgaactgccagattgacaaaaccagccagaccatagggctatgatctgcagtagttctgtggtgaagagacttgtttcatctccggaaatgcaaaaccatttatagcatgaagccctacatgatcactgcaggatgatcctcctcccatcctttccctttttaggtccctgtcttatacaacccagagaagtgggtgttggccaggcacatccccatctcaggcagcaagacnatctttcactcactgacggca

SEQ ID NO: 239 - DNA, 2090 bp, Homo sapiens
  misc_feature: Incyte ID No: 482325.15
cctccagagtcctctatggagagtctagctcaaactcccctgaatcatgaagtgacagttcaacctccaggtgaggatcaagctcattataatttgcccaagtttacagtcaaacctgcagatgtggaggttaccatgacttcagagcctaaaaatgagacagaatctacccaagcccagcaggaggccccaattcagcctcccgaggaggcggaaccttcttctacagccctgaggactacagatcctcctccagaacaccctgaggtgacacttccaccttcagacaagggtcaggctcagcattcacacctgactgaagccacagttcaacctctggacctggagcttagcataactacagagcctactacagaggttaaaccgtctccaaccacggaggaaacctcagctcagcctccagacccggggcttgccataactccagaacccactacagagattggacattccacagccctggagaagactagagctcctcatccagaccaggttcagactctgcatcgaagcctgactgaagtcacaggtccacctacaaagttagaatcttcgcaggattcattggtgcagtctgaaactgcaccagaggaacagaaggcctccacaagcaccaacatatgtgagctctgcacctgcggagatgagactctgtcatgtgttggtctcagcccaaagcagaggctccgccaagtgcctgtgccagagcccgacacctacaatggcatcttcaccaccttaaatttccaaggaaactatatttcataccttgatggaaatgtatggaaagcatacagttggaccgagaaactaattctcagtgaaaattatttgactgaattacctaaggattcatttgaaggcctgctatacctccagtatttagatttatcctgcaataaaatacgatatattgaaagacaaacatttgaatcactaccatttttgcagtatataaatctgggctgcaatttaattacaaaactgagccttggaacatttcaggcctggcacggaatgcagtttttacacaacttaattctcaatcgcaatcctctgactactgtcgaagatccatatctctttgaactgccggcattaaaatatctagacatgggaacaacacacatcacacttacaacacttaagaacattctcacgatgactgttgaactggaaaaactgatcttacctagccatatggcctgctgcctctgccaatttaaaaatagcattgaggctgtctgcaagacagtcaagctgcattgcaacactgcatgtctgactaacagcatacattgtcctgaagaagcatctgtagggaatccagaaggagcgttcatgaagatgttacaagcccggaagcagcacatgagcactcagctgactattgagtcggaggcgccctcagacagcagtggcatcaacttgtcaggctttgggggtgatcagcttgaaattcagctaaccgagcagctacggtccctcatccccaacgaggatgtgagaaagttcatgtctcatgttatccggaccttgaaaatggaatgttcagaaacacatgtgcaagggagctgtgccaagctcatgttgcgaacaggcctcctgatgaagcttctcagcgagcagcaggaagcaaaggcattgaatgtagaatgggatacggaccaacaaaaaacaaattatattaatgagaacatggaacagaatgaacagaaagagcagaagtcaagtgagctcatgaaagaagttccaggagatgactataagaacaaactcatcttcgcaatatctgtgactgtaatactaataattttgattataattttttgtcttatagaggtgaattcacataaaagggcatcagaaaaatacaaagacaacccatcaatatcaggagcctgagcatgagttaaagcatgtggatggcctggagctatgtttttaaaattgttattaaatattggttttttacttaaatcaatgaaaactttctttactttgtggttgtgttcctcaaaatgagaatttttaacaataataaaaataaagcttgttagatcattaaa

SEQ ID NO: 240 - DNA, 264 bp, Homo sapiens
  misc_feature: Incyte ID No: 064851.1
ctgagcatgtttagtaggaataaggtaaccaggggctctagcagtgccctgaatgcttttgagagtcagccaacatgttcatttttaagaggtttctaaatatagactctcataagaagtaccttgtacactatttgtgtcctctccaggaatcacgggagtgaatcacattccagacacttgcttggacttcatcacatcctcagtgactgggctggaagaaatatcacagagctctctttttatgggtaaagagaggaaggt

SEQ ID NO: 241 - DNA, 2667 bp, Homo sapiens
  misc_feature: Incyte ID No: 346016.5
cgagtggacaaaatggcgaagatcgccaagactcacgaagatattgaagcacagattcgagaaattcaaggcaagaaggcagctcttgatgaagctcaaggagtgggcctcgattctacaggttattatgaccaggaaatttatggtggaagtgacagcagatttgctggatacgtgacatcaattgctgcaactgaacttgaagatgatgacgatgactattcatcatctacgagtttgcttggtcagaagaagccaggatatcatgcccctgtggcattgcttaatgatataccacagtcaacagaacagtatgatccatttgctgagcacagacctccaaagattgcagaccgggaagatgaatacaaaaagcataggcggaccatgataatttccccagagcgtcttgatccttttgcagatggcttctattctgctgcttgaagtcagaactgctgatggagacaaaggcacgaaagtgaggggaagacccctgatcctaaaatgaatgctaggacttacatggatgtaatgcgagaacaacacttgactaaagaagaacgagaaattaggcaacagctagcagaaaaagctaaagctggagaactaaaagtcgtcaatggagcagcagcgtcccagcctccatcaaaacgaaaacggcgttgggatcaaacagctgatcagactcctggtgccactcccaaaaaactatcaagttgggatcaggcagagacccctgggcatactccttccttaagatgggatgagacaccaggtcgtgcaaagggaagcgagactcctggagcaaccccaggctcaaaaatatgggatcctacacctagccacacaccagcgggagctgctactcctggacgaggtgatacaccaggccatgcgacaccaggccatggaggcgcaacttccagtgctcgtaaaaacagatgggatgaaacccccaaaacagagagagatactcctgggcatggaagtggatgggctgagactcctcgaacagatcgaggtggagattctattggtgaaacaccgactcctggagccagtaaaagaaaatcacggtgggatgaaacaccagctagtcagatgggtggaagcactccagttctgacccctggaaagacaccaattggcacaccagccatgaacatggctacccctactccaggtcacataatgagtatgactcctgaacagcttcaggcttggcggtgggaaagagaaattgatgagagaaatcgcccactttctgatgaggaattagatgctatgttcccagaaggatataaggtacttcctcctccagctggttatgttcctattcgaactccagctcgaaagctgacagctactccaacacctttgggtggtatgactggtttccacatgcaaactgaagatcgaactatgaaaagtgttaatgaccagccatctggaaatcttccatttttaaaacctgatgatattcaatactttgataaactattggttgatgttgatgaatcaacacttagtccagaagagcaaaaagagagaaaaataatgaagttgcttttaaaaattaagaatggaacaccaccaatgagaaaggctgcattgcgtcagattactgataaagctcgtgaatttggagctggtcctttgtttaatcagattcttcctctgctgatgtctcctacacttgaggatcaagagcgtcatttacttgtgaaagttattgataggatactgtacaaacttgatgacttagttcgtccatatgtgcataagatcctcgtggtcattgaaccgctattgattgatgaagattactatgctagagtggaaggccgagagatcatttctaatttggcaaaggctgctggtctggctactatgatctctaccatgagacctgatatagataacatggatgagtatgtccgtaacacaacagctagagcttttgctgttgtagcctctgccctgggcattccttctttattgcccttcttaaaagctgtgtgcaaaagcaagaagtcctggcaagcgagacacactggtattaagattgtacaacagatagctattcttatgggctgtgccatcttgccacatcttagaagtttagttgaaatcattgaacatggtcttgtggatgagcagcagaaagttcggaccatcagtgctttggccattgctgccttggctgaagcagcaactccttatggtatcgaatcttttgattctgtgttaaagcctttatggaagggtatccgccaacacagaggaaagggtttggctgctttcttgaaggctattgggtatcttattcctcttatggatgcagaatatgccaactactatactagagaagtgatgttaatccttattcgagaattccagtctcctgatgaggaaatgaaaaaaattgtgctgaaggtggtaaaacagtgttgtgggacagatggtgtagaagcaaactacattaaaacagagattcttcctcccttttttaaacacttctggcagcacaggatggctttggatagaagaaattaccgacagtaatttgatactactgtggagttagcaaacaaagtaggtgcagcagaaattatatccagggcagcggctacaacagcaaaagctctagctgttgtgttacga

SEQ ID NO: 242 - DNA, 5347 bp, Homo sapiens
  misc_feature: Incyte ID No: 346016.6
gccagttccgtctgtgtgttcgagtggacaaaatggcgaagatcgccaagactcacgaagatattgaagcacagattcgagaaattcaaggcaagaaggcagctcttgatgaagctcaaggagtgggcctcgattctacaggttattatgaccaggaaatttatggtggaagtgacagcagatttgctggatacgtgacatcaattgctgcaactgaacttgaagatgatgacgatgactattcatcatctacgagtttgcttggtcagaagaagccaggatatcatgcccctgtggcattgcttaatgatataccacagtcaacagaacagtatgatccatttgctgagcacagacctccaaagattgcagaccgggaagatgaatacaaaaagcataggcggaccatgataatttccccagagcgtcttgatccttttgcagatggagggaaaacccctgatcctaaaatgaatgctaggacttacatggatgtaatgcgagaacaacacttgactaaagaagaacgagaaattaggcaacagctagcagaaaaagctaaagctggagaactaaaagtcgtcaatggagcagcagcgtcccagcctccatcaaaacgaaaacggcgttgggatcaaacagctgatcagactcctggtgccactcccaaaaaactatcaagttgggatcaggcagagacccctgggcatactccttccttaagatgggatgagacaccaggtcgtgcaaagggaagcgagactcctgggagcaaccccaggctcaaaaatatgggatcctacacctagccacacaccagcgggagctccttacttcctggtacgaggtgatacaccagggccatgcgacaccaggccatggaggcgcaacttccagtgctcgtaaaaacagatgggatgaaacccccaaaacagagagagatactcctgggcatggaagttgatgggcttagactcctcgaacagatcgaggttgagattctattggtgaaacaccgactcctggagccagtaaaagaaaatcacggtgggatgaaacaccagctagtcagatgggtggaagcactccagttctgacccctggaaagacaccaattggcacacagcccatgaacatggctacccctactcccaggtcacataatgagtatgactccctgaacagccttcaaggcttggcgggtgggaaagagaaattgatgagagaaatcgccccactttctgatgaggaattagatgcctatgttcccagaaggatataaggtacttccttcctccagctggttatgttcctattcgaactcccagctcgaaagctgacagctactctcaacacctttgggtggtatgactggtttccacatgcaaactgaagatcgaactatgaaaagtgttaatgaccagccatctggaaatcttccatttttaaaacctgatgatattcaatactgtgatagactagttggttgatgttgatgaatcaacacttagtaccagaagagcaaaaagagagaaaaataatgaagttgcttttaaaaattaagaatggaacaccaccaatgagaaaggctgcattgcgtcagattactgataaagctcgtgaatttggagctggtcctttgtttaatcagattcttcctctgctgatgtctcctacacttgaggatcaagagcgtcatttacttgtgaaagttattgataggatactgtacaaacttgatgacttagttcgtccatatgtgcataagatcctcgtggtcattgaaccgctattgattgatgaagattactatgctagagtggaaggcctagagatcatttctaatttggcaaaggctgctggtctggctactatgatctctaccatgagacctgatatagataacatggatgagtatgtccgtaacacaacagctagagcttttgctgttgtagcctctgccctgggcattccttctttattgcccttcttaaaagctgtgtgcaaaagcaagaagtcctggcaagcgagacacactggtattaagattgtacaacagatagctattcttatgggctgtgccatcttgccacatcttagaagtttagttgaaatcattgaacatggtcttgtggatgagcagcagaaagttcggaccatcagtgctttggccattgctgccttggctgaagcagcaactccttatggtatcgaatcttttgattctgtgttaaagcctttatggaagggtatccgccaacacagaggaaagggtttggctgctttcttgaaggctattgggtatcttattcctcttatggatgcagaatatgccaactactatactagagaagtgatgttaatccttattcgagaattccagtctcctgatgaggaaatgaaaaaaattgtgctgaaggtggtaaaacagtgttgtgggacagatggtgtagaagcaaactacattaaaacagagattcttcctcccttttttaaacacttctggcagcacaggatggctttggatagaagaaattaccgacagttagttgatactactgtggagttggcaaacaaagtaggtgcagcagaaattatatccaggattgtggatgatctgaaagatgaagccgaacagtacagaaaaatggtgatggagacaattgagaaaattatgggcaatttgggagcagcagatattgatcataaacttgaagaacaactgattgatggtattctttatgctttccaagaacagactacagaggactcagtaatgttgaacggctttggcacagtggttaatgctcttggcaaacgagtcaaaccatacttgcctcagatctgtggtacagttttgtggcgtttaaataacaaatctgctaaagttaggcaacaggcagctgacttgatttctcgaactgctgttgtcatgaagacttgtcaagaggaaaaattgatgggacacttgggtgttgtattgtatgagtatttgggtgaagagtaccctgaagtattgggcagcattcttggagcactgaaggccattgtaaatgtcataggtatgcataagatgactccaccaattaaagatctgctgcctagactcacccccatcttaaagaacagacatgaaaaagtacaagagaattgtattgatcttgttggtcgtattgctgacaggggagctgaatatgtatctgcaagagagtggatgaggatttgctttgagcttttagagctcttaaaagcccacaaaaaggctattcgtagagccacagtcaacacatttggttatattgcaaaggccattggccctcatgatgtattggctacacttctgaacaacctcaaagttcaagaaaggcagaacagagtttgtaccactgtagcaatagctattgttgcagaaacatgttcaccctttacagtactccctgccttaatgaatgaatacagagttcctgaactgaatgttcaaaatggagtgttaaaatcgctttccttcttgtttgaatatattggtgaaatgggaaaagactacatttatgccgtaacaccgttacttgaagatgctttaatggatagagaccttgtacacagacagacggctagtgcagtggtacagcacatgtcacttggggtttatggatttggttgtgaagattcgctgaatcacttgttgaactatgtatggcccaatgtgtttgagacatctcctcatgtaattcaggcagttatgggagccctagagggcctgagagttgctattggaccatgtagaatgttgcaatattgtttacagggtctgtttcacccagcccggaaagtcagagatgtatattggaaaatttacaactccatctacattggttcccaggacgctctcatagcacattacccaagaatctacaacgatgataagaacacctatattcgttatgaacttgactatatcttataattttattgtttattttgtgtttaatgcacagctacttcacaccttaaacttgctttgatttggtgatgtaaacttttaaacattgcagatcagtgtagaactggtcatagaggaagagctagaaatccagtagcatgatttttaaataacctgtctttgtttttgatgttaaacagtaaatgccagtagtgaccaagaacacagtgattatatacactatactggagggatttcatttttaattcatctttatgaagatttagaactcattccttgtgtttaaagggaatgtttaattgagaaataaacatttgtgtacaaaatgctaatttgtgtgtgttttttgaacatgacttgtaaaatgcggaactttgataaagtattggtttatgtggaataagtggcttaatttcattttctgtcacatggtttatagaaagtagttagctgaataaaaactatataaagtgatggcatctttgtcaaaattccattgttgtgttaataatgacagcaagaagagtagcctcaggggatgttcccctcaaactagcacaaccattccatcatcgtagaaaagtagcacttttgctaaactgtcttgaatattttgtacttacatagcgcctttcatctcttgatttctcaaaatgctttatgaacacatttaaagaaagtggtttaagtcttgtccaacacttgacaggtctgctgtgtttagcaagtgaggaatttaactttacttcaaaactgctttctgcctattaggagtgaggatacctaagtaatgctgatagaacaggacaatgttgggcttttctccatgttataagccactactcagcaatgcatcagtaaatacctattcacccactgtatgccagccactgtgcttatatgcaggggatgcaaaggtgcatgagacctgccctctacctttaagaacagtataatggagaaggggagacaaaccttgtgacagattccttatgtactgtgataatacacagtggcagcagctaaaatgtctaggtttgcttagctttgtattcagtaataataagttgatctaagagttcagcataaactgaatgaaatgccatttaatggtagaggaaccaagcattaaggcagtactacacttaattttttaagcaaatatgtaaagtatattttcaaacttttctaatgttatggccccaaatttcttagttttggcctttttactacctatactatttttactgttttgttttgtctccatgtggtagtacttctgtgaactctaaagggaaaaaaaattctgcaagcagcattagtatataactactactgtaagtaaaactgcctattgacactttaggagttcctgcttcagaagct

SEQ ID NO: 243 - DNA, 510 bp, Homo sapiens
  misc_feature: Incyte ID No: 222222.1
aatttttgtatttgttagtagtagacagggtttcactgcctgcctctagcctccctatagtgctgggatttactaggctatgagcctccgtgcccggtgctatccctaatcttgagcatgatctcagtcggcaaatgaggccatctgttttcagcctgtttgaaaataagatgtggggaggccatgatggaaatagcacgtggggttaaacataactggcagatgtgggagcgatggtggggcatgccattcaaacaggtcccaaaatgggtgcaacaaggtatagcacatctaccactcgctaacttgactgacttggagaaatgactacacttttgcctgtttcctcatttggaaaatagccatattaacacctctttcattggcttgctgtcagggtactgggatggggggaggtgcatgggttggggtggccaccaggtggtgctgtgccacagcgggcagcccctctggaaatgactggcatcataaaatctgtcttcatacccg

SEQ ID NO: 244 - DNA, 3684 bp, Homo sapiens
  misc_feature: Incyte ID No: 413835.5
tctggcggtccgccccgggtagagggtcccctggcggcccgggccaggaggggcacgcgcttttacccacactgtgagcctcagcagctccagccagcgcacccgacggctgagagtgtcctaaccgctttggagagcgataacttgagttaaagcacctgtctgtgcctggcctccagcagatcttggtccagtgagaagatggggagccccgaggatgacctgattgggattccattcccggaccacagcagtgagctcctgagctgcctcaatgagcagcgccagctgggccacctatgtgacctcaccatccggacgcagggccttgaataccgcacccacagggctgtgctagctgcctgtagccactacttcaagaagcttttcactgagggcggtggcggagctgtcatgggggccgggggtagcgggacggccactgggggagcaggggccggtgtgtgtgagctggactttgtagggccagaggcactaggcgccctccttgaatttgcctatacagccacactgaccaccagcagcgccaacatgccagctgtgctccaggctgcccgcctgctggagatcccgtgtgtcatcgctgcttgcatggagattctgcagggcagtgggctagaagctcccagcccggacgaggatgactgtgagcgagcccgccagtatctggaggcctttgccacagccacggcctctggagttcccaatggtgaagacagtcctccacaggtgcccctcccaccacctccgccaccgccacctcggcctgttgcccgccgcagccgcaagccccggaaagctttcctgcaaaccaagggggccagagcaaaccacctagtccctgaggtgcccacagtgcccgcccatcccttgacctatgaggaggaggaggtggcgggcagagtgggcagcagtgggggcagtgggccgggggacagctacagccctcccacaggaactgcctcccctcctgagggtccccagagctacgaaccctatgagggtgaggaagaagaagaggagctggtatatcccccagcctatgggctggcgcagggtggcgggcccccgctgtccccagaggagctgggctcagatgaggatgccatcgatcctgacctgatggcctacctaagctccctgcaccaggacaacctggcaccaggcctggacagccaagacaagctggtgcgcaaacgccgctcccagatgcctcaggagtgccctgtctgccacaagatcatccatggggcaggcaaactgcctcgccacatgaggacccacacaggcgagaagccctttgcctgcgaggtctgcggtgttcgattcaccaggaacgacaagctgaagatccacatgcggaagcacacgggagagcgcccctactcatgcccgcactgcccagcccgcttcctgcacagctacgacctcaagaaccacatgcacctgcacacaggggaccggccctatgagtgccacctgtgccacaaggctttcgccaaggaggaccacctgcagcgccacctcaaaggccagaactgcctggaggtgcgcacccgacggcgccgcaaggacgatgcaccaccccactacccaccaccctctaccgctgctgcatcccccgctggcctcgacctctccaatggccacctggacaccttccgcctctctctagctcgattctgggagcagtcagcccccactgggcccccggtctctaccccagggccccctgatgacgatgaggaggaaggggcacccaccacaccccaggctgaaggtgccatggagtcctcttaaagagggacgagggccagactgaagcagcacaaggccggggacacccatgccaagcagtgggagcacgcaggacagacacagcaggggtctggggcacggagccttgctggcatcagcatcagcccttcctcccagagccctcattccaattccaagctaagaaggtattggggcagaggctccccaaattggggtgatcccccaaggagtgatacatatattgtgtatatatttacagctgtattgtaaaagtggggtccctgtccccagctgctcctggggagtagaagcaataatgtatttctaatttgtgggtcccacttcggctatgcgggtttctagggggtgggggcttgggaccaaagccttgccccgcccctatgccccttgggggttttggctgtgtaagggggtgaaggactgcccctccctttcgagacccctccttcctggtttctgttcctttttcctggcagtgaattatgcaaagggggccggcaaaggaagggtaggtgggggaaagccaggtggaagcttgaaagactgggggactgggcctgtaaggaaggagccatcccagtccccctccgccctgctcccggcgctgagtcatggggtcgtggagaagggggcggggtggcctgattggctcgcctgcccctgggggcagtagagggggcagtagagggggcagtagaggggccccgcccagctaggggagccgctccgttccactcccctccctagccctccctccccacggccctgggcagggaatgtcttgttcccgccgctccctccccggggccagagggcagggcgggccgggcggcgtcctaccctcttctcctcctccccatctcctccccgcccaggtgcgagccggagccgccgccaccgctgccgcccctgactcacgccgcccccgggctggcgcagcgaagggtgtgggacagggtaaggggttggaagagccttgtggagagcgggcgagccggcgccatctggcggccatgctctgagtgggcgagcgccccccgcggccactggagcgagctgtcttcacgctcctcatccaccccagctggtgagcggcgcccccttgccaaggcagtgggcacagaacttctcgcttggccgcaggggaaggggctgcggagctgtgggaaagtgatccccttcccagatccttgccagccgggcttcctgtcaggcaggggagaataatccccactctgctcttaggattgaatccacccccattctgtacatagcctcttctgttggtcttgttgaaatctagtttcagatttttaactacccaattctgctgggggtgggggacacccccccttcctcgctgggtgctggaccccttttgcagcctgggctctgccttgcactatttccccttcctggcctgacggctcctccccctccttaaaaggggcaggttcaggggcccggtgctcttcctcccttccatgcacccccatgcccatttgcacagctgcccaggtacccctaacagtggggaggggtcacagggagggggtagcgggaccagtccctgttatctatttaaaaagtgatgatgtaatatattggggtggcggggagatcgggttgtcctgggcctcatcttagcatttcaggtgatggggggagcccagggctggggagacctggggcccagccccagaaagtggggacaatgtggcctcccttctccctactttcggctttcccagtcagtgccttagggggagaggcactccccccctcctattcccttccccccaccccaactcccccacctcgggtgtaagcgacaggaagaaataataataatttaagattcac

SEQ ID NO: 245 - DNA, 1807 bp, Homo sapiens
  misc_feature: Incyte ID No: 978273.4
cacatcaggtcaggtggcgtttgctgtggcggctaggcccgcgtgcgctggagactccgggcgtggccccgcgagcctcctgccctggcccggcgctgcggctctgccgcggcggcagcatgggtggcccccggggcgcgggctgggtggcggcgggcctgctgctcggcgcgggcgcctgctactgcatttacaggctgacccggggtcggcggcggggcgaccgcgagctcgggatacgctcttcgaagtccgcaggtgccctggaagaagggacgtcagagggtcagttgtgcgggcgctcggcccggcctcagacgggaggtacctgggagtcacagtggtccaagacctcgcagcctgaagacttaactgatggttcatatgatgatgttctaaatgctgaacaacttcagaaactcctttacctgctggagtcaacggaggatcctgtaattattgaaagagctttgattactttgggtaacaatgcagccttttcagttaaccaagctattattcgtgaattgggtggtattccaattgttgcaaacaaaatcaaccattccaaccagagtattaaagagaaagctttaaatgcactaaataacctgagtgtgaatgttgaaaatcaaatcaagataaagatatacatcagtcaagtatgtgaggatgtcttctctggtcctctgaactctgctgtgcagctggctggactgacattgttgacaaacatgactgttaccaatgaccaccagcacatgcttcacagttacattacagacctgttccaggtgttacttactggaaatggaaacacgaaggtgcaagttttgaaactgcttttgaatttgtctgaaaatccagccatgacagaaggacttctccgtgcccaagtggattcatcattcctttccctttatgacagccacgtagcaaaggagattcttcttcgagtacttacgctatttcagaatataaagaactgcctcaaaatagaaggccatttagctgtgcagcctactttcactgaaggttcattgtttttcctgttacatggagaagaatgtgcccagaaaataagagctttagttgatcaccatgatgcagaggtgaaggaaaaggttgtaacaataatacccaaaatctgattggtcatatttttccaaagagtaatgcagtctggatataaatgtattttctgtcttccttataaggggattctcccagctgctaaatttaaacagtaaatatcacattttgtcattaacacagctataacttgccgtggttctcagatttattttggactattttgatgccaagtgaatataagagcttgtactgaaaccatttatttctttctattttgctatttgcaaatgcttgttatcttccctacatgaagtggcagtaacctttttcacatttaagctacccttctaccttttgaagtgatttgcagttactcatctgagacagcatcagtatttgactaaatcattgtttcacaactgaatagtcttgttcttttagtagcaatgaaatcctaagctcttgaggccattcacctgccaacctgaccatactgctttcaaaagtcttttctcatcagtagaatctattttggtcacttctagtcaatgaaaaatgtaaacttttaggagagaatgtttcctaggactcacccactccattcaatgttacatataaaatagtgtgatcaatcacaatgtccatctttagacagttggttaaataaattatctggtctttgaaaagaccgtgctgggcgcggtggctcttg

SEQ ID NO: 246 - DNA, 9591 bp, Homo sapiens
  misc_feature: Incyte ID No: 474673.1
  unsure 8681: a, t, c, g, or other
ccgcggtgagccgcgaggaagagaggcgagcgagagtggaggaggaggcggcggctgcgggacggtccccaggaatgtcgctgccccccccccccctgccgttgaggaggagacggaggagaccgacgttgttagggaagatgatccctatgatcttgaagatgtttctgcacagaaatgagggaaatacaaagaaccaaatacagttctaaatttgggatctgtattttgagatgattttattttcagaatgagaagcatatctggttacctttatgaatgtagagacatgagaagagagttatgatggcaaaaaacaaagagcctcgtcccccatcctataccatcagtatagttggactctctgggactgaaaaagacaaaggtaactgtggagttggaaagtcttgtttgtgcaatagatttgtacgctcaaaagcagatgaatattatccagagcatacttctgtgcttagcaccattgactttggaggacgagtagtaaacaatgatcactttttgtactggggtgacataatacaaaatagtgaagatggagtagaatgcaaaattcatgtcattgaacaaacagagttcattgatgaccagactttcttgcctcatcggagtacgaatttgcaaccatatataaaacgtgcagctgcatctaaattgcagtcagcagaaaaactaatgtacatttgcactgatcagctaggcttagaacaagactttgaacagaagcaaatgcctgaagggaagctcaacgtagatggatttttattatgcattgatgtaagtcaaggatgcaataggaagtttgatgatcaacttaaatttgtgaataacctttttgtccagttatcaaaatcaaaaaaacctgtaataatagcagcaactaaatgtgatgaatgcgtgggtcattatcttagagaagttcaggcatttgcttcaaataaaaagaaccttcttgtagtggaaacactcagcgcaataaaagtcaacattgaaacatgttttactgcactggtacaaatgttggataaaactcgtagcaagcctaaaattattccctatttggatgcttataaaacacagagacaacttgttgtcacagcaacagataagtttgaaaaacttgtgcagactgtgagagattatcatgcaacttggaaaactgttagtaataaattaaaaaatcatcctgattatgaagaatacatcaacttagagggaacaagaaaggccagaaatacattctcaaaacatatagaacaacttaaacaggaacatataagaaaaaggagagaagagtatataaatactttaccaagagcttttaacactcttttgccaaatctagaagagattgaacatttgaattggtcagaagctttgaagttaatggaaaagagagcagatttccagttatgttttgtggtgctagaaaaaactccttgggatgaaactgaccatatagacaaaattaatgataggcggattccatttgacctcctgagcactttagaagctgaaaaagtctatcagaaccatgtacagcatctgatatccgagaagaggagggtggaaatgaaggaaaaattcaaaaagactttggaaaaaattcaattcatttcaccagggcagccatgggaggaagttatgtgctttgttatggaggatgaagcctacaaatatatcactgaggctgatagcaaagaggtatatggtaggcatcagcgagaaatagttgaaaaagccaaagaagagtttcaagaaatgctttttgagcattctgaacttttttatgatttagatcttaatgcaacacctagttcagataaaatgagtgaaattcatacagttctgagtgaagaacctagatataaagctttacagaaacttgcacctgatagggaatcccttctacttaagcatataggatttgtttatcatcccactaaagaaacatgtcttagtggccaaaattgtacagacattaaagtggagcagttacttgctagtagtcttttacagttggatcatggccgcttaagattatatcacgatagtaccaatatagataaagttaacctttttattttagggaaggatggccttgcccaagaactagcaaatgagataaggacacaatccactgatgatgagtatgccttagatggaaaaatttatgaacttgatcttcggccggttgatgccaaatcgccttactttttgagtcagttatggactgccgcctttaaaccacatgggtgcttctgtgtatttaattccattgagtcattgagttttattggggaatttattgggaaaataagaactgaagcttctcagatcagaaaagataaatacatggctaatcttccatttacattaattctggctaatcagagagattccattagtaagaatctaccaattctcaggcaccaagggcagcagttggcaaacaagttgcaatgtccttttgtagatgtacctgctggtacatatcctcgtaaatttaatgaaacccaaataaagcaagctctcagaggagtattggaatcagttaaacacaatttggatgtggtgagcccaattcctgccaataaggacttatcagaagctgacttgagaattgtcatgtgcgccatgtgtggagatccatttagtgtggatcttattctttcacccttccttgattctcattcttgcagtgctgctcaagctggacagaataattccctaatgcttgataaaatcattggtgaaaaaaggaggcgaatacagatcacaatattatcataccactcttcaattggagtaagaaaagatgaactagttcatgggtatatattagtttactctgcaaaacggaaagcttcgatgggaatgcttcgagcatttctatcagaagttcaagacaccattcctgtacagctggtggcagttactgacagccaagcagatttttttgaaaatgaggctatcaaagagttaatgactgaaggagaacacattgcaactgagatcactgctaaatttacagcactgtattctttatctcagtatcatcggcaaactgaggtctttactctgttttttagtgatgttctagagaaaaaaaatatgatagaaaattcttatttgtctgataatacaagggaatcaacccatcaaagtgaagatgtttttctaccatctcccagagactgttttccctataataactaccctgattcagatgatgacacagaagcaccacctccttatagtccaattggggatgatgtacagttgcttccaacacctagtgaccgttccagatatagattagatttggaaggaaatgagtatcctattcatagtaccccaaactgtcatgaccatgaacgcaaccataaagtgcctccacctattaaacctaaaccagttgtacctaagacaaatgtgaaaaaactcgatccaaaccttttaaaaacaattgaagctggtattggtaaaaatccaagaaagcagacttcccgggtgcctttggcacatcctgaagatatggatccttcagataactatgcggaacccattgatacaattttcaaacagaagggctattctgatgagatttatgttgtcccagatgatagtcaaaatcgtattaaaattcgaaactcatttgtaaataacacccaaggagatgaagaaaatgggttttctgatagaacctcaaaaagtcatggggaacggaggccttcaaaatacaaatataaatctaaaaccttgtttagtaaagccaagtcatactatagaagaacacattcagatgccagtgatgatgaggctttcaccacttctaaaacaaaaagaaaaggaagacatcgtggaagtgaagaagatccacttctttctcctgttgaaacttggaaaggtggtattgataatcctgcaatcacttctgaccaggagttagatgataagaagatgaagaagaaaacccacaaagtgaaagaagataaaaagcagaaaaagaaaactaagaacttcaatccaccaacacgtagaaattgggaaagtaattactttgggatgcccctccaggatctggttacagctgagaagcccataccactatttgttgagaaatgtgtggaatttattgaagatacagggttatgtaccgaaggactctaccgtgtcagcgggaataaaactgaccaagacaatattcaaaagcagtttgatcaagatcataatatcaatctagtgtcaatggaagtaacagtaaatgctgtagctggagcccttaaagctttctttgcagatctgccagatcctttaattccatattctcttcatccagaactattggaagcagcaaaaatcccggataaaacagaacgtcttcatgccttgaaagaaattgttaagaaatttcatcctgtaaactatgatgtattcagatacgtgataacacatctaaacagggttagtcagcaacataaaatcaacctaatgacagcagacaacttatccatctgtttttggccaaccttgatgagacctgattttgaaaatcgagagtttctgtctactactaagattcatcaatctgttgttgaaacattcattcagcagtgtcagtttttcttttacaatggagaaattgtagaaacgacaaacattgtggctcctccaccaccttcaaacccaggacagttggtggaaccaatggtgccacttcagttgccgccaccattgcaacctcagctgatacaaccacaattacaaacggatcctcttggtattatatgagtaggaagtgattgcaaacaggctggatttggacaaaaagcaaatctagacatgcatgtttcagggttcagtagtatacttcatgtttcatacagataattcacattcaaaattacattttctctttgaactagatggtattccttattcacttacattacaaatctaagaccatgtgataagcatgactggagaggtttaatttttataaacaaaaatagctataaagtacaaagctgctgctgcatgcaaccttattgcaatcagtatatcattcctgtggcaatttctgtcaccttatattgtgaataaaatttttctatagaaattaaatgatttaaaaactcacctatatgaaacatttaatgcttttcagcctgctttctggctgattttgttatttgatgtgctaatttgggcaacttaatttacattctggcagtcggtgtagataactaaaagcccagttaagtattttataatttcaggctactgaggccatgcttgggatgttgtttgaaagaaagaaaaaatacacttgacatatttcacatttctgtaccttcatctttacttccaagtaaacccgtggatgatttgatgagggataaatgaacctatttcttttacacacataccaaggacatgcttgtggctaaagtgagttgataatgttgtgcaaaggatagttgtcaccaactcatttctttatggtccataatgaaataaaaattttgtatactgttaattctgtaaacagatgcatgttcaaaagatctatgatggtcttgtaatcttaatctaatatattttagatattttaattttttccctcttggggaacacatttagtatagtgtagaaaatacttccatgacattttcatataaggttatataacttttcatacataaacatgaaatttgttgtagaaaattctttaaaccaaacatttaaatctaggacttcaatttaatttgttccttgaatctatttttatgtggcccttaaaaaatatccaaaaaacccattgctaatatagcaataaaaatactttgggtactgacagactctttggagtgtttatattacaaatttgtattcatattcttttctgtgatgtgttgtactaaaatccaaaatggcttttgcaccatttttaagccaattttttcctttgatgttggtaccagaattactataagtgactgctgcttttgggggtaaacattttgttagtgaagataaaaccagaacactaaattatggataaaattttcagaataggtggcacaggtaaatttcactaggttatattttgtgtagtaaagaaaaaaattatttggtcaatgttatcttaattcatactacaatttaagattatcttatgtgtattatagtaaatagatgattttcagattcaaggctcctaagagtttgatttgctctgttttttcctaaaataaatattgtctctcccaactgttaagttctaggtattgtacttccaattttaacttcagaaccaagatgttggcatgaaccaggctgctgttgaagtacatgtatattataaattatcttatttgtgttatactcttacatgttatcttttctaagaaaacaaagtccctattattcctattgcaaagcacacaggaattaagaaagtacagtaatttttaaaaaaaaatccggtaaatgtagtattcttaacctgttctatattacttatacctattgtctatatagctttaatttatagttgtcagtttaactattggcatgtctggcaaagaaaattaaactttaagagttttataaactgtttctaggttgctaaagaatttatttttctactatatatggtatagacaaagcatcaaactatgtacaggaaaaaagcctgactatttctatttggaagtaggctgaaaagagaattttcaaaactgttcgtgtcttcagttcattctgtcataactttgctattgtaatatgtgaataccagtttatttaagctgttctcttttatactgtattaatttaatgttcatctgcgtttagtaccatttttgttattaaaactggcatttaccgtttttcacattaacccaccttgcaccttcccccaaacttatctccacttttctatgcattctatcattgatttgacacacttcatagtgagtcatttaaatactctacgtttggttcaattaaccagtaggttacagttattgaaaattaaagtacagtttaaagctcagtctgttacactgaattgattgtgtttgtttttgccaagggtttagatatgcttttaaatattagaaacatctaagaacagaataacataattaaacttttttctggtaagttactggaaggtttcactgtttagggacctatcatatgagacttcttaaaggattaaaagaataggatagtctcataattgtgagtaaacatcaaggcattatattttacaatactgaataaaatttcatctacacacatgttgccattgtttcatttaaggttcagtgcttatagttaactacaatattggacctaacaggatctagattagcaatataaagaagcatagtggtactctgtttcacactttcagtagatttattagaagtcaaattctattcaacagacacttattaggatatacaactaatttaagaataaaattccaggcacaatatattttttttaaatggtatttgttagtagtgcttcttccccttaacatttacagtgtaaatactgcaggtaaccgcaatctaagttagccaaaaagcagctttttttcccatactgtatgtaaataatgtagacctgggtttttttgtttatttgggtttgttttttttttttgaggtactggaatctaattaatatctcttaggtatcaacaaaagggaacaattggaatgagaatttaggccttagcttccatggtgatttttagttttttatacagtaataattgtgatgctatttgtcaactggatataaatacacatataattttaaaaagtcaaaagtgcttttgtttctttgtttaatgtaatttttgtgcttcacctacaggatgctgcagtaaattaaatatcagtgaagcttctgatgtataaagaatgctatgaataaaacattaagaagctgtgtaattttaagttatagttgcctctatttttaccatttcattggtaaaaattagctaatttttttcaagtgaaatgaaaaataaaaatataaatttatcaatatgatggaaatcttattaaggagatgtattattgaattttcactgtacctgaaaaggagattcaaaattttttctggggatgtatataggtgaaaatttgattttttaaattatcaggaaaacaagataatgcacagatttctaagactaagatcttacctggatgtgatttttgagctgtggctagacattctttagagccactggaaatattttgaaaactattctagttatagcagagctgctaatattaacgaatatatttgtgtcttcatggtttgtgactattaggccaaattttgtggtatatgttgtcagtctggatctggtgaggtctgttcaacatgaatctttgtgttatcttgaatttagtagtttcaaggtacttaaattcttaacagtttctaatttgtttcaatacatatgggacatggttgatttttttactgtattagaactcttggaagttcttagccttttcaggttatgaaatacctgaaagtaaaattttctaagatttaataagggaagatactattcaaatcattttcttaggatagcatctttacatacaatgagaggnttgtacaagcattaatctcatattccaacatccagttacttgatgtgatccaagtaccctggtctttttgaagcagttaaaatctaattaattaactttgggagtcttcactattcaattgatcctcatcattgtcctatttgcatgactccattttttcctccactatatgagttttctttgtcagggggagaggagtgggaagagtcacagaatctcatattcacatcttaattaaattgtgtgaaattagtcttttgtggaaattctgtaggcagtatgattttgaaaagctaaccaatgataattagcattttagttaatactaaatgcataaaattataacccttgaaattaatttggtgctggcagttctggtttagtcatttttaccagtagttagtagtattaagacctgcagtatatgcactttttgagtagctgtcaaataattgtagttgagaaacaacttgtttattctcacaattcagattttctattcagttttgtctcaaatagtaagttattgtgaacaatttaataacggccctcctgttctagtttgcctaatattttagttaagatttagtgttttaacctatttttttaagtttattttttgtattagattttatttgaataagttatgtgggtttagtaattgacctatttattcattgcttcactaattcatccagattagttttaagtgtgtatatgtatttgctcaccagatcattttcttgggaccttgaactgtgaatgttttgtcctaaccatttaatattttctaggtacttgctgcaagttcttgaactattttaccagctttaactttggggctcttagtttcttttctccagattcttgttattttattttatccaaataaatatttaggtgttctaag

SEQ ID NO: 247 - DNA, 2510 bp, Homo sapiens
  misc_feature: Incyte ID No: 480286.1
  unsure 166: a, t, c, g, or other
agacaacgctcagaacctcgcaacaaaataagattgaaagagaaccaagaggaaagcctttataagctttcctaggggtggggtcaagaacgagtttttcattggtcctaatatggcttcagaaccggccaatcaagtcaagagtcggtgttgttacgtacgcatngctgaaaacgcaaggtccgcacacggaccaatggaaatgaacgactttcggagccctaatttgcataaggtggttataaaagaatcaggcccgcccattctcttacttcttttcttggctaagccgcgtttgtactgtgtcttaccatgcctgaaccggcaaaatccgctccggcccctaaaaagggctccaagaaagccgtcaccaaagcccagaagaaagacggcaagaagcgcaagcgcagccgcaaagagagctactccatctacgtgtacaaggtgctgaagcaggtccaccccgacaccggcatctcgtccaaggccatgggcatcatgaactccttcgtcaacgacatcttcgagcgcatcgcggggagaggcttcccgcctggcgcactacaacaagcgctccaccatcacatcccgcgagatccagacggccgtgcgcctgctgctgcccggcgagctggccaagcacgccgtgtccgagggcaccaaggcggtcaccaagtacaccagctccaagtgagtccctgccgggacctggcgctcgctcgctcgagtcgccggctgcttgactccaaaggctcttttcagagccacccacctaatcactagaaaagagcttgttcacttattcccttagtttcttttcataaagtaagttattttagtgtgaaggtcatgggaaatggcatacgtagctttttaactatttggaactcgaggtccccagtgcgtcattggatttgcttttgaatctagagcgtgtctttactcattgtgctgcttagccttcccaggagtcggttctcaattaggctgttgggaatccgcctctttacccgcccccactcccgccccacacgcgccctggtggctccttgggtctgtttcattctaaaacgaagtggctgagttcggctgtcatttaagagaactccaggacacaattcagcccgggttccgcaaacactggcgtgacagctctgtatgactgacgcttggcagcagcttttgtgtccggtcaccagttctgccgtgcgatggggcctcctgtggataccagccgttctgtgtattttggacgaaggccgcgcagccgggtcccagccttgtcctgattgggcgacaagaatattcaaaattctgcgcctttttctaatttgtagatttcagtttccgtcgttcactttgagactttgaaattcctatttctcattttgttgataatttctgcatttaatggtctgtgctttaaatggtaacgctacggccccaggtcactgcgaggcacttaccatgtagatacgggctcaaaagtcacctctcagagacctacgtcatccactcaggaattcgcgcctctcatacttgcctgtctcattttatcttccttctagcagctgtctgaaattggttcgtctgttttcttgtttatggtattctcaagcccttgacagaccggctagtgtggttttcccgtgcatcttcagcctgggcacattatggacacttaaatactacgtattgatctaatattgttgggttaatttttccatcccacccttttcttaatcgcttccgtggatggatgaagggtgctgttcatttccattagatgtatgtgaaggcacagtgaaaatggaaatgttcttggagctacttcctcaaaatgtatccttagtcacctcagtgcaacagctgggagggggccgtgttaagattttttttgctacaaagaggaggtggcaatggtagatccacccttatgcttctcagtttagcataacctcttatggattttcatcaaattcagcgtgttggtcactggaaagagccttttccttctccttttcttactctcccctcatggtgttcccctcttaaaggagaggagcttttaatttacacttaccacctcatttgcttttctggaggccatgcaatataggcgggactacagagttaatctcctttttacaaatgaggccaagagaagcctcattggttcacagtcatgcagctcatactgtccacccttgtattctcagatgcaggacaattgcattttagttttattttgtggaggtgcagaatatttactctttctgtccaacccttgattctgccgaggaagacactgatggtttgatgagtgattcagctgtttttggctaagggcttttggagctgatggcaggggtttgatgaatccaaatgagctctagacattatcacagactgaatagatcttaactgtctcctacatgtgtgttttcaaatgtgtatagatgctattgttattaataaagttaccaattaatttaaaaaaaaaaaaaagg

SEQ ID NO: 248 - DNA, 1501 bp, Homo sapiens
  misc_feature: Incyte ID No: 402640.1
ggcactagacaaatttaaaattgttagaaaccattggcaactgatattcagagcctaagttaaaagcaggatatgtctcaggagcaaatcttttgtgtaaatcctggtatttttactgcagacctttaaaatgacagacgcgggtgagtaaaaattacttctggaaatggatatgattaattaattcaattaattaattcaattaaatcaatataattcaattaattaattcaattaaatcaatataattcaattaattgccagccttggttcacactgatgagtgtgctcattggagagactcagcatgcaaaagaaaagactcatcaatttgcagttatttaatttcacgaactgccggatggtggagtcagtagcagcggctgggccgcaacatggcgcctcccacctagacttccggtcaggaaacttccaccttcctccgatttacgtgggcctgcatgagcctacttctcttcttattctagtgccagtggcctctggagtcttggtccttcttactggaagtagccctcctctcctgttacagaggcaataattctccagccttccggtcgccgccaaagcctcctgcctaatcacttcctgtattgtctccctgcggctctttgcacagaccttgggctccgtcgtctctggattcttactgatctcttcctcttctcccaaccgccttgtcatgtctctttgagctatgtcaggaggaacggaagggcactttcttaacttttgttagccaaacggacaaactgtcccctcccctttgttgtaaccacacattcaaggcttccttcagtccagccccatctcccttttcgttgcctccctttcactactccaaatgagcttgccatactttaaacgggtcttgtactttcttatcccttctctggaatgtcatttctactgaagaaaatcctactcttccctcaagacccttctttaatcccctcttgccatggaaacttgagattttcattgaggagctaagttggaaaatataaactagagctgagtctctaccctggcactattgacatttggggccagattattcttggttggggagactgttctgtgcactgtaggatgtggagcagcctcccaggcctctacctgccaaaagcacactcccctttccccaagtggtgacaaccaactgtttccagacattgccagatgtcctgaggtgggagtgagggtgaacagaattgcctcccagctgggggctgctggactaatcaacaagaagtggcaaggactgcaggcaaattgcctcagcacttagatttagcactgcaaggccacttcgacaggtggtagtgatttgtgcgtctcatttcctattcttgattgtgacaaggttctggaggatggagacagctacccctgccacagttcccacaggctatgttgtacatagggcttcatatttaacatgtgagtgaatgaaacacatgagcccgagtgctcttcagga

SEQ ID NO: 249 - DNA, 1687 bp, Homo sapiens
  misc_feature: Incyte ID No: 232218.1
gcgcggttgccaatggtcgctccctgagaggatgccgctcgtggtgttttgcgggctgccgtacagcggcaagagccggcgtgctgaagagttgcgcgtggcgctggctgccgagggccgcgcggtgtacgtggtggacgacgcagctgtcctgggcgcagaggacccagcggtgtacggcgattctgcccgtgagaaggcattgcgtggagctctgcgagcctccgtggaacggcgcctgagtcgccacgacgtggtcatcctggactcgcttaactacatcaaaggtttccgttacgagctctactgcctggcacgggcggcgcgcaccccgctctgcctggtctactgcgtacggcccggcggcccgatcgcgggacctcaggtggcgggcgcgaacgagaaccctggccggaacgtcagtgtgagttggcggccacgcgctgaggaggacgggagagcccaggcggcgggcagcagcgtcctcagggaactgcatactgcggactctgtagtaaatggaagtgcccaggccgacgtacccaaggaactggagcgagaagaatccggggctgcggagtctccagctcttgtgactccggattcagagaaatctgcaaagcatgggtccggtgccttttactctcccgaactcctggaggccctaacgctgcgctttgaggctcccgattctcggaatcgctgggaccggcctttattcactttggtgggcctagaggagccgttgcccctggcggggatccgctctgccctgtttgagaaccgggccccaccaccccatcagtctacgcagtcccagcccctcgcctccggcagctttctgcaccagttggaccaggtcacgagtcaagtactggccggattgatggaagcgcagaagagcgctgtccccggggacttgctcacgcttcctggtaccacagagcacttgcggtttacccggcccttgaccatggcagaactgagtcgccttcgtcgccagtttatttcgtacactaaaatgcatcccaacaatgagaacttgccgcaactggccaacatgtttcttcagtatttgagccagagcctgcactgaccagaggaggtaggggggaagccatggcttctgatctccactccactttatttctctgggaaaaataggctgcaggtctccagagcatatcgatgcagtactgtactagagctgttgtgactgattcactcaaactttcctgcatacccctgtgccaggccttgggtttacagcataagttcagactaaagagaatggagaactattgtggtgcaacctggcaaatccctcagaggacagagctaaggtggacagggattacctagattggatcctacttgggctatcacagagcattgaccattggcttccctcatctgaggcgtgggagagcagactggatagatgagaattgttttaaaacaattgtgaacagaaactgaagatggtacagttctacatctgcacctgcccttttttcataccacaaaagtattttttgagtactgtactgactttttgctagtttctattctgggaccgagttcacagataaatccattggtttgtatccttgagaaactttgtttttgtggaagtaagaaagttatctactagattatttcctctaataaaatcttttaaaatagt

SEQ ID NO: 250 - DNA, 301 bp, Homo sapiens
  misc_feature: Incyte ID No: 981919.1c
cagcagtgtaaaaacagactaatacaccactcctctaccttctttattttctcagtgtggaaaatgcctgatgaaagctttggggccctcacagatgcacaactcaagtgctgattctatcacttatctaccagctctgtgaccttgaacaagccgcttaaccttgctaagcctctgttttctcatatgtcaaatggtgataataatgcctacctcccgaggttgttgtaagaattataagcacaaatgtatgtaaagtgcctggcacaaagtaggtgctcaataaatggtagctattata

SEQ ID NO: 251 - DNA, 962 bp, Homo sapiens
  misc_feature: Incyte ID No: 229369.1
gttgctagtaattcttaccctattgtgaatcctatataagcaaatttgtatctttgttttttcctacattagcagatctatttgatgtatatctctgagtgcagaaaatattttatggaaaaatcaatatatggaatttcaaattcagaattgctgatacacactatttggtttcacaattttatcctaggaaatagtattagagatttcaatttctggcttaaatggtagaattaattactcttaactcttaattttacttctgagttgaggtcaaggaacaggcagacacctgcagttaacgtctatacctctccatggccaagagttttaattttctcgtcttcaattttgtagatgttcatcattactaaatggattgattagtattttatctcctctccttgtccttactttccctctggtaaatatgttataaacagtgtaaggctcctaagatagagtagctggtaggacttagaagagaaacaaagggcactgataactcacataaatggaaaattggctctggaataactgacaacatattcaagtattttagtgcagtgtcactctcattaagaagaagagaatcagtaaatctatgtgactctaaacattctaatgaaaaaaggaatattctgccaattatctcacatttctaaatatctggatattggccattgtaaagacaaaacatacagatgatggacttgtctttccacctctcatttgcatggtttggagcattgtacctccagccatagactctaaggcaatttatatttgcttcctcttccctcttgagagaaaacgaaaatcttatttttccaagcaattaaaactcttctgcttcagctaggatgaaagaattaggagttctgtctccttgtatctaattgcatgtttcatctttcttgttttaatgattgacagaaaactaataaactgagacatctttg

SEQ ID NO: 252 - DNA, 7819 bp, Homo sapiens
  misc_feature: Incyte ID No: 253946.17
  unsure 4012-4050: a, t, c, g, or other
gcgccccgccccgccgcgggactggggtggcgcgctacctctgcggagaaggatctgacagtgttccggagccggggcgagcagccaaaaggcccgcggagtcgcgctgggccgccccggcgcagctgaaccgggggccgcgcctgccaggccgacgggtctggcccagcctggcgccaaggggttcgtgcgctgtggagacgcggagggtcgaggcggcgcggcctgagtgaaacccaatggaaaaagcatgacatttagaagtagaagacttagcttcaaatccctactccttcacttactaattttgtgatttggaaatatccgcgcaagatgttgacgttgcagacttggctagtgcaagccttgtttattttcctcaccactgaatctacaggtgaacttctagatccatgtggttatatcagtcctgaatctccagttgtacaacttcattctaatttcactgcagtttgtgtgctaaaggaaaaatgtatggattattttcatgtaaatgctaattacattgtctggaaaacaaaccattttactattcctaaggagcaatatactatcataaacagaacagcatccagtgtcacctttacagatatagcttcattaaatattcagctcacttgcaacattcttacattcggacagcttgaacagaatgtttatggaatcacaataatttcaggcttgcctccagaaaaacctaaaaatttgagttgcattgtgaacgaggggaagaaaatgaggtgtgagtgggatggtggaagggaaacacacttggagacaaacttcactttaaaatctgaatgggcaacacacaagtttgctgattgcaaagcaaaacgtgacacccccacctcatgcactgttgattattctactgtgtattttgtcaacattgaagtctgggtagaagcagagaatgcccttgggaaggttacatcagatcatatcaattttgatcctgtatataaagtgaagcccaatccgccacataatttatcagtgatcaactcagaggaactgtctagtatcttaaaattgacatggaccaacccaagtattaagagtgttataatactaaaatataacattcaatataggaccaaagatgcctcaacttggagccagattcctcctgaagacacagcatccacccgatcttcattcactgtccaagaccttaaaccttttacagaatatgtgtttaggattcgctgtatgaaggaagatggtaagggatactggagtgactggagtgaagaagcaagtgggatcacctatgaagatagaccatctaaagcaccaagtttctggtataaaatagatccatcccatactcaaggctacagaactgtacaactcgtgtggaagacattgcctccttttgaagccaatggaaaaatcttggattatgaagtgactctcacaagatggaaatcacatttacaaaattacacagttaatgccacaaaactgacagtaaatctcacaaatgatcgctatctagcaaccctaacagtaagaaatcttgttggcaaatcagatgcagctgttttaactatccctgcctgtgactttcaagctactcaccctgtaatggatcttaaagcattccccaaagataacatgctttgggtggaatggactactccaagggaatctgtaaagaaatatatacttgagtggtgtgtgttatcagataaagcaccctgtatcacagactggcaacaagaagatggtaccgtgcatcgcacctatttaagagggaacttagcagagagcaaatgctatttgataacagttactccagtatatgctgatggaccaggaagccctgaatccataaaggcataccttaaacaagctccaccttccaaaggacctactgttcggacaaaaaaagtagggaaaaacgaagctgtcttagagtgggaccaacttcctgttgatgttcagaatggatttatcagaaattatactatattttatagaaccatcattggaaatgaaactgctgtgaatgtggattcttcccacacagaatatacattgtcctctttgactagtgacacattgtacatggtacgaatggcagcatacacagatgaaggtgggaaggatggtccagaattcacttttactaccccaaagtttgctcaaggagaaattgaagccatagtcgtgcctgtttgcttagcattcctattgacaactcttctgggagtgctgttctgctttaataagcgagacctaattaaaaaacacatctggcctaatgttccagatccttcaaagagtcatattgcccagtggtcacctcacactcctccaaggcacaattttaattcaaaagatcaaatgtattcagatggcaatttcactgatgtaagtgttgtggaaatagaagcaaatgacaaaaagccttttccagaagatctgaaatcattggacctgttcaaaaaggaaaaaattaatactgaaggacacagcagtggtattggggggtcttcatgcatgtcatcttctaggccaagcatttctagcagtgatgaaaatgaatcttcacaaaacacttcgagcactgtccagtattctaccgtggtacacagtggctacagacaccaagttccgtcagtccaagtcttctcaagatccgagtctacccagcccttgttagattcagaggagcggccagaagatctacaattagtagatcatgtagatggcggtgatggtattttgcccaggcaacagtacttcaaacagaactgcagtcagcatgaatccagtccagatatttcacattttgaaaggtcaaagcaagtttcatcagtcaatgaggaagattttgttagacttaaacagcagatttcagatcatatttcacaatcctgtggatctgggcaaatgaaaatgtttcaggaagtttctgcagcagatgcttttggtccaggtactgagggacaagtagaaagatttgaaacagttggcatggaggctgcgactgatgaaggcatgcctaaaagttacttaccacagactgtacggcaaggcggctacatgcctcagtgaaggactagtagttcctgctacaacttcagcagtacctataaagtaaagctaaaatgattttatctgtgaattcagattttaaaaagtcttcactctctgaagatgatcatttgcccttaaggacaaaaatgaactgaagtttcacatgagctatttccattccagaatatctgggattctactttaagcactacataaactgactttatcctcagactagctgaatgattttgtgctgtttcaggatgtttgcactgaagaaaaacagaaagcttatctgaaatttataaaactttttgttttgctacatagaaaacagaaggtatttgaataataagcagtgatatgcttagtgagcacagctatactgattttgattagaatagtcatcagagtggcttagggacagttaatataaaagaggagcaaggtgtagaccatcatctacttctgctaaaataacttaaaaagaggtccataggccataactacatgagcccagcttttgtaatctgacaaaaaaatgaggagcagcttcgtgtatatcagtgtacacggtattccttaggtcccttccattggtagtgatgctgcgagttattactggagaaaaggaattctagagctttaacttggcagattaaaagtactcattttttattcatcaataattagtaatctcactagttttcaaaaatttgcatattattgacaacctctttgaagatgcatttcacaaactcaacagagtgccatgataagagctagggatcccccaaactatctcaagcatctaaaaaattgccatttttaaaggcttaaattgtagtagtaaaggggaaaacaggaagtagtagtaaaggggaaaaaaaaccaataaagcatctaaaaaattggcatgttaaaaggcttaaattgctannnnnnnnnnnnnnnnnnnnnnnnnnnnnnnnnnnnnnncacacacatatcattgacttttcttaagacttcagagtactgggtagatgaacactttatacagtatatatcttcagcttaaatttgttttgagtattttttttatttttaaataagtaggcaaagatttaaatttttttatttttagtaaatgtttgaggcacactaagacaacttgggcaatatttgccaaaacaaaacagaaccccaaaaaatgtacatcttgttcttagcaaatatcattattgtagagacacttaataaagagatggtattttaatgtctgcagttctgaggtagggtggaacttagttctacattgtgatttaggaatttttaaaaccttttttcttcaagggagaagtgacccaggcctcgagtttagtgctaaagccgctagtgtacttatgctgtcccctaaccaccacgtgcgatatggaagcagatgctaaatataggggttttcttagaaagtaagaggaaattagcaagcgttattagtgattgactactgctatcaagtgaattcaaaggaaacaggtttttatgccatatttaagttacagaaaccaggcatgcttagaatagtttctagaggttattggagaatagaaagctaagaaaacttggtatacatttacaatggaaatataattacactttttactctcagaatattgttcacattagacttcctgtttatcttttatattcttgcatttatataatgcctcatcctttcaaagttctttcacatattatatgatcttctttatgaaaaaaatagatgtttcattctgatatattcagtttcccactttaggcaaaagtagattaatagaatgacgaattcaaagtagatgaggaaaatcaggcacagagaagtaaaggtagggatagacccaaatttacacaacaagataatgacatctccagcttttaagttgatcatcaaaggctgggctggatttgtcttgctgtatgtgtcaggaaatttatacctattacattttccattttctcaaaatttaagtcacatgactaatatttagctgcaactttcctcataacaaatagtgtcatgaagaatgttgtagtgtgaagtttgtacatttcagggtcagatatacaatatgaactcttaatctacaggaatgagaatggaggatcattgaaggccatgatataaacaaatttgcatgttgaagcctgtataaaacatggtacagtgagtgaatatacccccatccccaagaacactttatacatattaaatggatatatgattactgtgcaaaaattcattctggaaatgaacatatatttgagcactaatatgtaatgtacacctgccctaaggagaaaataaattataaaactttttacattcaaaattactttcccaagcatgtcttagaataatctatgtgttgatgcatgtaaattgtactttaggtaggcaaagaaatctggttatttatgtaaaaactagtctaataaagttagttagtggctttatcactttaaatctttagtgtccaaaagtggtgtttaaagtaatagcacatcagaaaaccttgtctggacaaaactagttcactcactgcttctgcacctgcagttgctccctttagggttataaaataatgacccaaatgttacatgtgttgatattataacttgtcagttactgatgtctgtggtatcctaccctcatctctgaaagggataatactgaataattattagaaaactataaaacttcacactttgtaccattaaaacctaaaattttaatcttgtccttttttactatggatcagtcggcactcgggaacagcagcaaggaaaaaaagcaaatttcattcacatgttctgtgttcatacctcttctctacctaattgttcatttaaatttcagccttattccttgataagggattttaccacatgaagtcatccagtgaccctagctcttattgtgaagttagtggagtatacttagaaatgttacaactttaaaatgttacaaaacattcattaaagctcatatttaaagtagagcatctagtttgagaaatagaaatcaattattaaagatgtcttttttctacccatttaactagttaaaaccatgacatgtaaatgtagaagtagaataatcatagaattccctaaaatatttctgtttactaacatatattgaccaagtacatcaagcaggagagatcttccttcattctgttatagtccacatcattctaattttgctcagttgttattaagagcatattcctaaaccatacacttttgtttcaataaagttttattttgttgagatgaataaaataacaaagttataagctgcataagacaaaagttcaattgttcaaaaaaaatttactgggatagctttctattacaggtattgttagattatattgtgctgataagattactttctaaaaaatttgtacttttctgtaaattaaaagaatatggagtcataaaatggcaagtgttttaggattagcctaaaattggacattgtcattgatttcaaagaaggtatgaactagcagtcttacagcctaattcttctttggactggtccttggcagcagttccttttcagactcgataaacagaattcagatgatgtaagtcaaaacaaaactttacaaagccaagcgtattatcttttgcattaacctatttttttccatcatacatgctactagtatgtgcattagcatgatattctcatatacattgcattaaaaattaaaaggtggcagctcagggtgagctcttctgttgctcatttgttcctaaatttttaagggctttttctcagtcaatagtttgtacaaactggttagtttaacttcattacccatttcattaaagttgatgggtcgtgtgatgagatgcatttaaggccgatagtgatagatgttttttttatttcttgaacacaggctttgtctgaatgatgttcttttatctcttgaacacaagctttgaatgataactacaggttttaagtgctgttacattaataccataatgtgatgtgttagaaacaaagggatatttcaaaggtagatatttgaaaattctctagtctcaatatgtatgtgtattgaatatactctaaaaataaatgtgcaatttgctagtaggacaatgcagtgactgactagcattaggtatgtttcttttatatcctagctatgtcccactttcttctaagtgcaatcctttcatgttcacttgctgttttaccccatctactctaacttcatttggaaggcttgtctagagtatagcatgtatttttacctttgcagtgaattgcatgtgctaattgtaaccacagctatttttatgttgacataactccaaatgttatattaaatgttctattatatattagctctaatcccttaagtaaattttaagaaataaatacttgttcaaattttttttctgtatgtggttactatcatctgactatgcatatttgtaacagcatttatcattagtggtgttagctaaataagcatcttagtgtaaatgagatgcttcgtgtgggttttgtgacattttaaatgacataatggaatgtgatttaaaagaaaaccagtacactatcttggtcttaataacatagaatggagatggcaaatttatccactagttttccagatttactatttaatagctgaggtctgaaatcgtagcatcctccctcctagtggacatt

SEQ ID NO: 253 - DNA, 579 bp, Homo sapiens
  misc_feature: Incyte ID No: 013550.1
gcagagcccatccaggcagcacggctggctgagcagagacaagggctgcccacactgggactggtagaggaagccggccctgacggatgggtggtctcgcccttcctgggttcatcctgctgcaggtgggcctgagtcgcagatcaggaagcaccgggaagatgcaggcctgcatggtgccggggctggccctctgcctcctactggggcctcttgcaggggccaagcctgtgcaggaggaaggagacccttacgcggagctgccggccatgccctactggcctttctccacctctgacttctggaactatgtgcagcacttccaggccctgggggcctacccccagatcgaggacatggcccgaaccttctttgcccacttccccctggggagcacgctgggcttccacgttccctatcaggaggactgaatggtgtccagcctggtgcccgcccaccccgccaggctgcactcggtcgggcctccacaggcatggagtccccgcaaaaacctggcccctgcaggagtcaggcctggtctcacgctcaataaactccggactgaagatgcacaaaaaa

SEQ ID NO: 254 - DNA, 1091 bp, Homo sapiens
  misc_feature: Incyte ID No: 997704.1
  unsure 502-644: a, t, c, g, or other
cgaaacgagaaggctttcaaaattactctgcggtacactaatttaacagattagatcactttccaggctttaagttggcctttgttctaccctttttttagtgtatgataaaagttgtgttggttcgttgatcagcatgcaatgaactctggctcttgttaatcaggtgactacagttttgtccttacatttgtatgtatgtcatgagtggttttgtatgggcaggaggtaaacaacgcacatttaaatatacttaatgatttatcattccaatgttttctggttgttttagtctttcatttgtctcttgaacaatctgaaacatccctattctaaggctaaaaaatttcctttacaaacttaggttaaacattcctaatctgaaatccaaaatgctctaaaattcgaatttttttgagtgctgacgtgaccccacaaatggaaaattccacacttgccctcatgtgacactgggtgacagtcaagtcacaatcaagcctgnnnnnnnnnnnnnnnnnnnnnnnnnnnnnnnnnnnnnnnnnnnnnnnnnnnnnnnnnnnnnnnnnnnnnnnnnnnnnnnnnnnnnnnnnnnnnnnnnnnnnnnnnnnnnnnnnnnnnnnnnnnnnnnnnnnnnnnnnnnnnnnacatttttttttaaaacgccatcaaaactttgtttcatgcacaaaattatttaaaatatataatataaccttaccttcaggctatgtgggtaaggtaaggtgtatgtgaaacaaatgaatttcccatttagacttgggtcccatccccaagatatcttattatgtatatgcaaatattccaaatcaaaaatatctgaaatacttttgtcccaagcatttcagataaaggttactcaacctgtaataaaaacactcagtgcttgcctgaaggaaaaaccaagaatttgtcatccatccttaaatttttatgacaccctttgtaatcaggaaaccttttaatacctaagaatatatttgatatattctggtatatgtttatcattctgatgtttaatgttctatgttgggcatatatcagtgtaataaatacattagatccaaaaaaaa

SEQ ID NO: 255 - DNA, 2582 bp, Homo sapiens
  misc_feature: Incyte ID No: 385608.45
  unsure 1912-1935: a, t, c, g, or other
tttaggggatagattctttatcttatgagggtttgggcaagtcaaatacttagtttctgagccttattttgtctctagagcaagaaaactgtaaattaggcagccggtgaggggccctcacagctttggctgtgggttcaggacaccagatttctaccactcactttcttcttacttctcctgcacagggatcatggcccaagttgcaatgtccaccctccccgttgaagatgaggagtcctcggagaccaggatggtggtgacattcctcatgtcagctctcgagtccatggtgaggccttctgttccatcattccatagttgggtaggcctgcacattgaatgatgttcatccgcttttcatctgccccagggaaagctttaggcaaatccacagtggtacctgtaccatatgagaagatgctgcgagaccagtcggctgtggtagtgcaggggcttccggaaggtgttgcctttaaacaccccgagaactatgatcttgcaaccctttatgagaagcaccctcgtagtctagtggagttacacacacacagtctgatctcagctgtggctctccagagatacaacatagtccaatcaaataacatcctctgagcctgtttctttagcttttgaatgttgggaattgaccaggaggtgactgtaactgtaagatggttcttccagtaatgaccattttctttttcaagatgatgattattctccaccgtctaagagaccaaaggccaatgagctaccgcagccaccagtcccggaacccgccaatgctgggaagcggaaagtgagggagttcaacttcgagaaatggaatgctcgcatcactgatctacgtaaacaagttgaagaattgtttgaaaggaaatatgctcaagccataaaagccaaaggtccggtgacgatcccgtaccctcttttctagtctcatgttgaagatctttatgtagaaggacttcctgaaggaattccttttagaaggccatctacttacggaattcctcgcctggagaggatattacttgcaaaggaaaggattcgttttgtgattaagaaacatgagcttctgagttcaacacgtgaagatttacagcttgataagccagcttcaggagtaaaggaagaatggtatgccagaatcactaaattaagatggtggatcagcttttctgcaaaaaatttgcggaagccttggggagcactgaagcccaaggctgtaccgtaccaaaaatttgaggcacacccgaatgatctgtacgtggaaggactgccagaaaacattcctttccgaagtccctcatggtatggaatcccaaggctggaaaaaatcattcaagtgggcaatcgaattaaattgttattaaaagaccagaacttctgactcacagtaccactgaagttactcagccaagaacgaatacaccagtcaaagaagattggaatgtcagaattaccaagctacggaagcaagtggaagagatttttaatttgaaatttgctcaagctcttggactcaccgaggcagtaaaagtaccatatcctgtgtttgaatcaaacccggagttcttgtatgtggaaggcttgccagaggggattcccttccgaagccctacctggtttggaattccacgacttgaaaggatcgtccgcgggagtaataaaatcaagttcgttgttaaaaaacctgaactagttatttcctacttgcctcctgggatggctagtaaaataaacactaaaggtaagagacgacgtgtactccgtatcctatttgagcgcattaagacactctttatccgcattccttaaatcatacggaatcggccaatatctctgtggggcttggagttgtttactttgctttctaaggtattttatttaatggaactatttttcnnnnnnnnnnnnnnnnnnnnnnnncatttcattggaaatgtcacatttgcaatcccagttcattcatgttttcacagctttgttgagcccctgtggaggattacactacaagtttaattctgcaggtttctttgaaaagaaccaaactgtatgaattttaatactctgctcttataaagcatctccttctgtatttttttttccctacaatatacaaaaggaactctgcttattttacagctttgcagtcccccaaaagaccacgaagtcctgggagtaattcaaaggttcctgaaattgaggtcaccgtggaaggccctaataacaacaatcctcaaacctcagctgttcgaaccccgacccagactaacggttctaacgttcccttcaagccacgagggagagagttttcctttgaggcctggaatgccaaaatcacggacctaaaacagaaagttgaaaatctcttcaatgagaaatgtggggaagctcttggccttaaacaagctgtgaaggtgccgttcgcgttatttgagtctttcccggaagacttttatgtggaaggcttacctgagggtgtgccattccgaagaccatcgacttttggcattccgaggctggagaagatactcagaaacaaagccaaaattaagttcatcattaaaaagccc

SEQ ID NO: 256 - DNA, 1211 bp, Homo sapiens
  misc_feature: Incyte ID No: 385608.25c
ggaagcatgtaggtggtcgtgtgatggtaacagatgctgacaggtcaatactatctccaggtggaagttgtggccccatcaaagtgaaaactgaacccacagaagattctggcatttccctggaaatggcagctgtgacagtaaaggaagaatcagaagatcctgattattatcaatataacattcaaggaagccaccattcttcagagggcaatgaaggcacagaaatggaagtaccagcagaagatgatgattattctccaccgtctaagagaccaaaggccaatgagctaccgcagccaccagtcccggaacccgccaatgctgggaagcggaaagtgagggagttcaacttcgagaaatggaatgctcgcatcactgatctacgtaaacaagttgaagaattgtttgaaaggaaatatgctcaagccataaaagccaaaggtccggtgacgatcccgtaccctcttttccagccttgggattccataccatgagggacttcggaaaggaatgttttctggcagtccttccacgtacagatcattcgggtgtgcctcaaatttttggtacggtacagccttggcttcagtgctccccaaggcttccgcaaattttttgcagaaaagctgatccaccatctttcttaatttagtgattctggcataccattcttcctttactcctgaagctggcttatcaagctgtaaatcttcacgtgttgaactcagaagctcatgtttcttaatcacaaaacgaatcctttcctttgcaagtaatatcctctccaggcgaggaattccgtaagtagatggccttctaaaaggaattccttcaggaagtccttctacataaagatcttcaacatgagactagaaaagagggtacgggatcgtcaccggacctttggcttttatggcttgagcatatttcctttcaaacaattcttcaacttgtttacgtagatcagtgatgcgagcattccatttctcgaagttgaactccctcactttccgcttcccagcattggcgggttccgggactggtggctgcggtagctcattggcctttggtctcttagacggtggagaataatcatcatctggtcttggaggacaggaaggcaagtttgatcaggccgtaggtgaacagcggatactctccttggcgacgctggcaacttgcagccgtgctccaggatgtgagttcca

SEQ ID NO: 257 - DNA, 4414 bp, Homo sapiens
  misc_feature: Incyte ID No: 385608.3
aggaggaggagggtgagagagaagctgggagagcagagaaaaggggccaccggtcgcccccccgcttccccgcacgcgctctccagccgcggccgcccgcctgccgcggtcaccccggcctctgcctctgtcccccagtgatcggatcaaggcgctgagcgaggccctgcctgcggggcggccatgcggcggtgacaggagcgcgaccgacacgcacgggcccctcgccccctctcgcctcccgtccgctcgccagctcccctcagccgaggctgctccgcggcggccgcagcccgcgcgcggcccacactcgcctcccctcggcacccccggccccggagctgcctggaggcggccgcactcggggatcatggcccaagttgcaatgtccaccctccccgttgaagatgaggagtcctcggagagcaggatggtggtgacattcctcatgtcagctctcgagtccatgtgtaaagaactggccaagtccaaagccgaagtggcctgcattgcagtgtatgaaacagacgtgtttgtcgtcggaactgaaagaggacgtgcttttgtcaataccagaaaggattttcaaaaagattttgtaaaatattgtgttgaagaagaagaaaaagctgcagagatgcataaaatgaaatctacaacccaggcaaatcggatgagtgtagatgctgtagaaattgaaacactcagaaaaacagttgaggactatttctgcttttgctatgggaaagctttaggcaaatccacagtggtacctgtaccatatgagaagatgctgcgagaccagtcggctgtggtagtgcaggggcttccggaaggtgttgcctttaaacaccccgagaactatgatcttgcaaccctgaaatggattttggagaacaaagcagggatttcattcatcattaagagaccttttttagagccaaagaagcatgtaggtggtcgtgtgatggtaacagatgctgacaggtcaatactatctccaggtggaagttgtggccccatcaaagtgaaaactgaacccacagaagattctggcatttccctggaaatggcagctgtgacagtaaaggaagaatcagaagatcctgattattatcaatataacattcaaggaagccaccattcttcagagggcaatgaaggcacagaaatggaagtaccagcagaagatgatgattattctccaccgtctaagagaccaaaggccaatgagctaccgcagccaccagtcccggaacccgccaatgctgggaagcggaaagtgagggagttcaacttcgagaaatggaatgctcgcatcactgatctacgtaaacaagttgaagaattgtttgaaaggaaatatgctcaagccataaaagccaaaggtccggtgacgatcccgtaccctcttttccagtctcatgttgaagatctttatgtagaaggacttcctgaaggaattccttttagaaggccatctacttacggaattcctcgcctggagaggatattacttgcaaaggaaaggattcgttttgtgattaagaaacatgagcttctgaattcaacacgtgaagatttacagcttgataagccagcttcaggagtaaaggaagaatggtatgccagaatcactaaattaagaaagatggtggatcagcttttctgcaaaaaatttgcggaagccttggggagcactgaagccaaggctgtaccgtaccaaaaatttgaggcacacccgaatgatctgtacgtggaaggactgccagaaaacattcctttccgaagtccctcatggtatggaatcccaaggctggaaaaaatcattcaagtgggcaatcgaattaaatttgttattaaaagaccagaacttctgactcacagtaccactgaagttactcagccaagaacgaatacaccagtcaaagaagattggaatgtcagaattaccaagctacggaagcaagtggaagagatttttaatttgaaatttgctcaagctcttggactcaccgaggcagtaaaagtaccatatcctgtgtttgaatcaaacccggagttcttgtatgtggaaggcttgccagaggggattcccttccgaagccctacctggtttggaattccacgacttgaaaggatcgtccacgggagtaataaaatcaagttcgttgttaaaaaacctgaactagttatttcctacttgcctcctgggatggctagtaaaataaacactaaagctttgcagtcccccaaaagaccacgaagtcctgggagtaattcaaaggttcctgaaattgaggtcaccgtggaaggccctaataacaacaatcctcaaacctcagctgttcgaaccccgacccagactaacggttctaacgttcccttcaagccacgagggagagagttttcctttgaggcctggaatgccaaaatcacggacctaaaacagaaagttgaaaatctcttcaatgagaaatgtggggaagctcttggccttaaacaagctgtgaaggtgccgttcgcgttatttgagtctttcccggaagacttttatgtggaaggcttacctgagggtgtgccattccgaagaccatcgacttttggcattccgaggctggagaagatactcagaaacaaagccaaaattaagttcatcattaaaaagcccgaaatgtttgagacggcgattaaggagagcacctcctctaagagccctcccagaaaaataaattcatcacccaatgttaatactactgcatcaggtgttgaagaccttaacatcattcaggtgacaattccagatgatgataatgaaagactctcgaaagttgaaaaagctagacagctaagagaacaagtgaatgacctctttagtcggaaatttggtgaagctattggtatgggttttcctgtgaaagttccctacaggaaaatcacaattaaccctggctgtgtggtggttgatggcatgcccccgggggtgtccttcaaagcccccagctacctggaaatcagctccatgagaaggatcttagactctgccgagtttatcaaattcacggtcattagaccatttccaggacttgtgattaataaccagctggttgatcagagtgagtcaaaaggccccgtgatacaagaatcagctgaaccaagccagttggaagttccagccacagaagaaataaaagagactgatggaagctctcagatcaagcaagaaccagaccccacgtggtagacctcttccctcctaggcttaaagtatcagtggttgagaagagcttttcggacctgttactaccccaagctgtgtaatatacttgtataacagaaataccttctatacaaacctttttttctacttttagatagaaatgtctactttttcagcagttctgtgaattaaagagcagagtgactgtgggtctggaatggctggtgtacttgggaatgtactatcaggattttacagcaatgctgggaaatgacagggaaaatgacaggaatgaatctcaccagattttttatgtactcagcagagccttgagttacggtgtttattttccaatcaagtgaagatatctcctacttctcctactggaacatctcagcttctgcagtgaagaaaaattcctgtgatagttcagttctttagtttttctatttgaaaaaaaaaatcatttaaatgatcctttgttcacggctctccttaatgactgagtgaacagttcctatctgtatatttgactaaaccttttcctaagctatctctcatggttcctatgtttttttatcataattaaaagcaaaaccatctggatcacctaacagtcagaggtcagtatctcagcgtgtgaattatagaggaaatacagagagaacctcttccacttttacttttcgtccaaataaaatgcatggtgtaccagaagttgaagatcgggttgaggattggggctagctcgatgacactaaggccccaacatcgcgggacctgctgtggcgcggattcttaggaacgctgttctagccggccccctctccaggggtcgccgtggccggcattatttcctagttcttcttgtaaccctgaggtgccagcgcggggagtgaggaggggtcagggggctaaggatgcaacctctgacgttctgcgccttcctaggagagtcttacatgtgttgagatttcacaagcaatgcgagttgtaaaataccagctctacaagaagctaggctctgtgacggcatagttttcagtagctttatcacaatattcacaatggagaattatatgacatggtagcagaaataggcccttttatgtgttgcttctattttacctcaaattgtagatatagggtaatcaataaaatccatccatgcctttcacacactaaaaagtcgga

SEQ ID NO: 258 - DNA, 193 bp, Homo sapiens
  misc_feature: Incyte ID No: 078434.1
  unsure 190: a, t, c, g, or other
gccggctgctgagacgcaactaggctgctgctgccgtcgattctgtaacaggagaaagccccatccgcgcccggattacagaccgtctgggccctaaactcagggggagactcccggcgtcttttgattccctgtcctcctgcagctctctgctggcgggcgtctaaataaagtagcttccccaaaaganaaa

SEQ ID NO: 259 - DNA, 1561 bp, Homo sapiens
  misc_feature: Incyte ID No: 243134.1
  unsure 871-975: a, t, c, g, or other
aattatctaaataattagttcgattatccattgcatagagtaggtccaagcacagtgagctcgtctgggaagcagacccccaaaacctcacatgacagggaccgttaacaaccagttatactgctcatgagccatgcaggcagccctacaagctaaccatgactcctggttctgttccaattacccaggtacaatcagaaggcaggtttcaatcagctggtcagagaaagggtcattgtgaacagaccacccaaaggtaggaaagagcccaggcagacaagctttggcgaagagcactcgcgctttggacctaagtgtcaaggtctgcgccgagtgcatagccctcacctttgggtggctgacctacacactgtcaggtgagagctttcatttttaaggccccccagatgatcctaatatgtagtcagattgagacccactgttctaacaggcccaaaacaaaaagaaaaagggtggctgactcttcccaaaagtgctggttatatctttctcaacaggcccattcaattcctgagcacgcccaacccagtggcagcacagtgggcaagacacacggatgcatcaagccgccagggctcacagcccagcaggaaacaaaaggagagtcactaacctctgaaaatgctttgcagcccacactacctagatccccagaccctcagtggattcctgatttcctcctattgatctctgcacgggctgttactgtgaccaggcctcgcatctgttcccttatgaccagatggttagaacctgatgcctcctaactggtcctgtaccaccggaacagagctgaaggttctaagccaggatgtccaatgtatggttccctgggccttagaggaagacnnnnnnnnnnnnnnnnnnnnnnnnnnnnnnnnnnnnnnnnnnnnnnnnnnnnnnnnnnnnnnnnnnnnnnnnnnnnnnnnnnnnnnnnnnnnnnnnnnnnnnnnntaaagaatatgtgttgggctgcattcaacagctgtcctgggccacatgtggcccacagaccgtgggttggacaggcttgttctaaatgtttagtttttttcccccaattcaccagcagttaccttcatgccaagtgggcagcagacacaagacaatcacttggcaaaatctattctttcaatactaacattatttacaaaggaaaaggaagaagcttgaaagaacacagaaagccaaaagacctaattgaacgtctgttaagaaccagctccttcctccaactgtgccagaaagtaactaagcttttggctggtccagcaagacagggcagtcaggctgacaatggtgctcttgctgaactttcagccagagtgcgattctgaactcccgggtgaacggtacaaggaaatcctgactgcaggctgggtcaacccgcccaatgccatcggacaaagaataaaacattactaccagggttccaaatgtgagccatctgactacgtcttgcacactgaaacctcagactagccaattctgcactccaatctccttcaaaagagagccgggagagactgctgcgagggac

SEQ ID NO: 260 - DNA, 3927 bp, Homo sapiens
  misc_feature: Incyte ID No: 196959.4c
agaaaaaaatgtctctaagtgcccctaaattaaagttgcaaaaactcctgagatatgagcctccattttgattgtgctcaatgacttaaaatttgatgaaacaaacaagcttacaaagagtcagacttcagacaaaatcatttaacactaagttgagaaatcactctttcgaagcttctgtttcaaacatgttacaactataatctagaatcagaaattatgaatctcaaaattcttttcaataaaaccaagacttcagattcctgctaggtacccaaaagagcagtttgccaggaaagaattatctaaaacctatccagtaggattattgcacagtggggcccacaggacaatgatttccaagggctagtccttatataaaaaaaggccacaataaatacatctatatattatgccccactctaacttgacatggtaaacacaaataagatgaattttgcttaaaaaagaaactcctgaggaaagaaaaggatggaaaactctaccaaggccacttaagtcagaaactgtaattactatttccactgccacaaaggacactctccaaatagactgaccgttccaagcaccaagattaaccagtgacaaggttatcacacttagtatttcactcagatcacagctcacactgagcgtttgaagaacttcctggcagaagagtctagaaaggaaataagctgctggcaatcaatccattcctgaacttaattccaccattagtcattaagggttgaggtgttatcagtgagatgctagcaaacccaaactctagcaaattccagtgtttaggccattatttttccctcacagttcttgacatctgcaaatggaattatggttgttctgttcttttaagaatctgggtagcaccatgtttcacttgcattgtaactcccccacaatatcccatccaatgtaataaggattcatggcaatccatgcagcagcctgtgatgcacaaagtagcccaagatttaaaccctcctgctcgccctattaaaatgtcaaatcctaagcacacaaataaaaacataccactctacgataagatattcaattattctccaatttcctgttataattaatgaatcatgatacacagagcactgggtagaattccaaacaccaaattatgtggtcaaaagtttctaaattgacaactgagccagcaaaccataccttgccatcagcacagacacacagtcacagtgtggagagttcatctgtttttagctggatgggtagtgggatttctcatggcttctgcttttcaaagcatttactctcattctaaaacagtatgctacacacaaaaccatccattttattccaggatacatcttaatgagaataaaaagcttctgtatgcacatactgccaatacatttaaaaaggcctaaattttaacaagtaggatagacaaattcatcagacaaaagatcataaattactttggccgaaaaaaatctttaaaaaaaatctggctcaacattctgcttgcaggtttctatatatactgtatatgtggtgagtgtgtatgtgtgcgtgtatatagagagagctttcttttgtttaaagggaatggagaacggtctagcccactttcccacagtcatgtaggaactacgatgttttttgcgagcaaaacaagaagtgcaaggtctgcattcccaccaactcgatgcaaagctccaagagcttcctgcaaagtaaagccagcacggagaatgcggtcaatatctgtggcaggaaaaatcaatggtggaagaatggcaggacttgatgatggatggctggtaggtggttcatattcaagtaatggcctcgaagcatcaggacagacattttctctggtttcaggcctgtctgttactgaattctgtatgccctgacctaagtctttaaccaatatgaaattggatgacaaagacttagtttgctcagaagtctgattgagtgcatcctcctcacctgctaaaagtttgggtgaaatttctacacctaaggtgcagtgtaactgattggatgttttagctgaggttacagtgacagaacggttcttatttatggattccctagatttggggacaccttccttatcggttgacaggccatcacctagactcctgaagtttacattttctacagcttctcttccagtgtcagatgaagtacctgttaatttttctgtctccactgatacagatatggcctgatgaaaggagacttgtggacactgttcattctgggtaagatgctcattttgggtccatctttcagaaaggtctttaatactggtttggccctcagctatggtttctgattgacagattacttcttcagatgtattttctgaagctggtttactgctaacaaccaaaagttcatgaagttctttcaaggctgccgttatagacgggcaagattcttctgctgactccacagaaggctgacaactgccacagagacttggagaggagtaatggccatattctttatttgttccaggtatttcaacattagtttctgggggctgtaaatcctgagtggaaatggaatcattcaaaatttcagatgaagggttacattttgatgtttctacttccatcaagggattatctaaagtgagatccaatgcaccaatgttcttgacattggcattctgcctgcctgttgaattaagcaaagtaactagggactgttgagctgtatcgatttccataaatgtttctgaatttgagcagccactgcattctgaagatggaatacttttcttcgcacttggaggatccacattctgtgggagcccatttcctttcatcgtagcttccaaatcaacaattttgtgttgattctgttgcctttcttcaggaagctcaaggtcccctatgttacaaagatattcttggtcatgtctcgaagctttttgttgtgcaacctcatactgttcattccctggttcttcgtgctgctgagggtcactcacttgactcaggttctgattttctggatgccaatccttttcacctagaaacatctgtggttcatgcatcctagtagatgtgacagataaactagcttcctgtcttgtatggagatgaaatttgaggccctgggtgcttctttcagcagatttctccagattacctgcaacagttatttcttcggatgaattctgcataggcatagctggactctggtctgttggagcatggtctgctgaggaagcatgatcagaaagatcttgtaaagaaagatgttctttcttttcagagtttagctggaattcagctgaagccttcaaagccttcacagctttaggttcaatgcgatctgagtcactgggcttgatagggcagactgaagcagagacagagcgagcaagactcataggattaccaacatcaggactctgtcctgaagaacgggcgggatggttaaacccatctgaagttggtaatgatgacattcccagtgaggtagattctttaccacttttctctggtctggggcccactccagctgcagtacacacacactacatgcatcatggcttctgacgctctgcatcctctgctgatttttgaagggcttctgctaattcttggtctgcaatctcctctggccgtacatcctctcttccagccccatatgccaaccgggcacactctggtagctctccctcaggaagaaaggtggtctgggagcctgtggtgccgatcacgagtacatttttcttcaggtcgatggaacactggtgccgtttaagcatgtccagtcccagaagcatgtccatgggctgttcctcaagtatagagaaggaacatggcaaaaaatctccttcaatctgaacctgagctaaaaagcacatgaagagaaaaggttattgttacgtacttcaaaaca

SEQ ID NO: 261 - DNA, 11963 bp, Homo sapiens
  misc_feature: Incyte ID No: 082168.5
  unsure 906-960, 1825-1863, 2773-2871, 3229-3307, 3684-3795, 3956-3995, 4197-4223,5882-6184, 6242-6274, 6559-6644, 7466-7515: a, t, c, g, or other
gccactggtctgcaggcgttttcttcttctaacttcctctcctgtgacaaaagagataactattagagaaacaaaagtccagaatgctaaggttgccgctttcacttcctctcaccctttagcccagaactgctttgaatacaccaattgctgtggggcggctcgaggaagagaagacaccagtgcctcagaaactgctcggtcagacggtgatagcgagccacgcattcacagggccactgctgctcacagaagcagtgaggatgatgccaggatgatgtctgcctcgcgcctggctgggactctgatcccagccatggccttcctctcctgcgtgagaccagaaagctgggagccctgcgtggaggtatgtggctggagtcagctcctctgaactttccctcacttctgcccagaacttctcactgtgtgccctggtttgtttatttttgcaaaaacaacaagagttcaattaccttaacgactcacgaagccacagagatcacataatccatggttacagggcactagaggcagccatggggggttggtcccattgggaaattttgagtgctaccaggggcatgagataacatagatctgcttaaggtccctgctctgctaccttgtggctctgtgaagaaattatcaaacctgtctgagactagttcacgcatctgtaagagacttataataccttcttcactagagagtaagcagactgcttcagtgtcatttcttcccactggtggtctttacactcagcttcaagcagtcaccctgctcctttcaatctcaggaaaaagatggcttttgtgtgtgtgtctctagagaaagaactttctaagtgggtgtcagacttctgtatgcagtaatatagtttagtccagaggatgaaaaaaatannnnnnnnnnnnnnnnnnnnnnnnnnnnnnnnnnnnnnnnnnnnnnnnnnnnnnntgtataatgtcagctaatgcaacagtttctttcttagtgaaataccaatcagctggttggtaatcttattcatgatggatctcttttgtttttcccctgcgcagacttcacagttgctttagaaacccatagtagagccgaacagctaagaaaatgatttacagtgaggcagggtcagaaactcaagagagaaaaagccagctgcagtcctgaagttgaggatataggagaaaatcaagtaatatttagcaaagactaattcattatcttgaagccatcccttccctcaattccctgcccatagtcctcctccttgtcctcttctctgtatccctctgctgttaggttaatggagatagattttctaattaggctcactgcgagataaaaccacagccaaacttgacttcttttccccatgtaccttttcctgtcagtccctgaagcctgtccatccctgcccatccccttagttccactgtaaggcaggccctcatttcccctggcattgactcttacacactaactgctttcctgattccagtcttcttcctttaactcattctgcacgttcttgtttgttatgtacttgcatttgttgttattatttttccttaggcttcaatctaacaaattactctccttaaaaacttttaataactctccattgccattagaacagctttctaccacagggcctttgcactggctatttcttctacctagaatgctagatcagtgctatccattggcaatattatgtgagccacatatgtacttttaaagtttttagtagcctcattaaaaaaagaaacaagtgaatttaatttcgataatagttttatttaacttagcgtatttaaannnnnnnnnnnnnnnnnnnnnnnnnnnnnnnnnnnnnnnatatttttacattccttgtttggtactaagtctggaatttagtatatattttacatttaccacacttctcaatttacactattcacatttcttgtgtttgataactgtgtatggctagtgactaccgtattggtcagtgcagcccaagtccttttcatgctttaatcactccattcagatctctgattaaatgtcccctcctcagggcagtcttccttgattgccccatgtagagctctccagcctcacttatttgcctcaaatccccttatactgcttaatatttttttttctagagcacaacattttatatttttgtttgtttattttctctctctccctttgtaatggaatcggtaaggaggcaggatcattgctggttttatttaccactatatttccagtggccagcacacagtagccgctagatgtgtaagtgataaatgattgaaataattgctgcaggacaaagtctgaggccctcctgatctggcttgccctcttacttagatttcaccactcccaccactcaccagctaatctgagtttgttttccactctttacgtgctcacgttgtcctctccttaggacatgtttttcttcccctttccacatatctaaaccttactcatcttccaagacccactttaaaatcttccttttctgggaagcctttcctgaatccagacttgatctctgctttctctgaaccacagggcatattttctaagcctattttatggccccttgagatagtgttagctttgctcctatctaaactcttactctagactgtgagtccattgaagtctggagctgcatcatatttttctttgtaatgcccacagcacttggcaggaaatgcctacaatttggacttaagtaaaccttcatttaatcagttattcnnnnnnnnnnnnnnnnnnnnnnnnnnnnnnnnnnnnnnnnnnnnnnnnnnnnnnnnnnnnnnnnnnnnnnnnnnnnnnnnnnnnnnnnnnnnnnnnnnntgcaatggaatacaggagatgaacaatacgatgagaacaatcagatagacaacataatgttagatggttgtgcttcctgtgaaagggaataaaagagggcaaagaaagagtgcctggcactgtttctattagacaatattgtctttgaggctccatggcttgcaacatttaagcagacatacgaatgaagatctgcatgtttgaactctgactttgcgcatattacttcatttctttgaatttccattttcctcatctttaaatgcttatttgaagattaagtgaaagtatataacaaacaagaactatgcaggcgtatggtaagggattaatgatagatgataataattaatgttgnnnnnnnnnnnnnnnnnnnnnnnnnnnnnnnnnnnnnnnnnnnnnnnnnnnnnnnnnnnnnnnnnnnnnnnnnnnnnnnttctattggtttcaaacaacagaaaactacaattagctggcttctgcaaggaattttgttggaggaaatgagagcattcagaaattagatgggagcgttagagaattaggcttacaaagaatgtgggaaagtaggctagaaagcagtgtaaaaacaaagacagcataaagcacttgaccttatttactaggttccaccatgggaatccatgcactctaaagatttccccctatttctacatcactttgctcaagggtcaatgagccaaggaaaagaatgcagttgtcaaaatctgggccatgactaaggaaggtctggacatcttgactgccagacagtctccccaatgatatggagtatttagaatgatactggannnnnnnnnnnnnnnnnnnnnnnnnnnnnnnnnnnnnnnnnnnnnnnnnnnnnnnnnnnnnnnnnnnnnnnnnnnnnnnnnnnnnnnnnnnnnnnnnnnnnnnnnnnnnnnntgaaaatatggaacgcatcatggatttgtgtgtcatccttgtgcaggggccatgctcatcttctctgtatccttccaattttagtatatgtgctactgcagcaagcacgatattggatattttattacctacattttacatatgataaaatgaggctcacnnnnnnnnnnnnnnnnnnnnnnnnnnnnnnnnnnnnnnnnaaagacttggccctaaaccacacagaagagctggcatgaaacccagagctttcagactccggagcctcagcccttcaccccgattccattgcttcttgctaaatgctgccgttttatcacggaggttagaatgctgagcacgtagtaggtgctctttactttctaatctagagtaagacaatttataagcatgaattgagtnnnnnnnnnnnnnnnnnnnnnnnnnnnaggatggacagatggatgaaaggttgactgaattttgtgcttgcacaaaaagaggcccctctccaccatctctggtctaggagaggggagttgggagaccatgcagtaaagatacttcatgtcatgtgtaatcattgcaggtggttcctaatattacttatcaatgcatggagctgaatttctacaaaatccccgacaacctccccttctcaaccaagaacctggacctgagctttaatcccctgaggcatttaggcagctatagcttcttcagtttcccagaactgcaggtgctggatttatccaggtaatgaatccacttttacatactgcacaaggtgaggtgttcattgtcctatcatttcattattggactggaaagcttggtttgtggagtctcatcttcattcacttattcattcatacaacagatgtcttattaactatataaccttgagcaagctacctctattctccaggtctcagttttctaatctgtgaagtaggcagttggctgagacagcttctaagggcaattctaattttaggttttcttttaagacaggagagaaaattagcttaaattctttcataagcagctatttattgactacttgctatatgttgtacactctgcaagaagacaggcatatattgatatataacacacagcccctgttgttaaggaggcatatcttcttgaaagagttaataccttaaagtcctgggtatggtcctgggtacatagtatatagtcaacacattttaattatgattttttggatctggaaactgatataaagatagcgacatataacagtaggtgataaattatgtttaaactaaaggtaactaattgtatttttcagaagaggggccttctctgtggtgggtagtcaagaaagatttcatgaactgcataagattcaaacaatgtctagaatattaaaactagtgtacaggatagggaattaggaaaagacaagtaacccaaggagaaagatgtcaagattaaaggaaaacatctgctgtgggcagggaataatggctaagattttcttttctgatgcagggaagtatatcgtttgttgtggcaggtgaaatgtcatcttgatattttaggggaaccaaattctaaaagggttttcatcatcggggccttatttgcaaatcgaactagataatggatcatgttctctgcaatggtttgtaaaacatttcaaaacattttacatattttttattatagaaattattgataaagactaaggtcacagtataaaaatcctttttagagcagacatttctgtagaagagtgaacatatgacctattatactctaatttggatatagataggatgtaacaaaggagtaatggaacaattcaaaggcagtggtatagtgcatagagtcctgttggggtcagaagacctgagccaagtttacccccaacatttataaccatgtaaccttaggcatattacttcatctcccttaatcttagttttcatatctgatcaatggaaatgatgaaacttattctgctggattaaatgtgataataaatattaatatgctgtatatatttaaatttttataaaatatattttataagcataaagtattcttacagaatttcattaggtttttaaaataannnnnnnnnnnnnnnnnnnnnnnnnnnnnnnnnnnnnnnnnnnnnnnnnnnnnnnnnnnnnnnnnnnnnnnnnnnnnnnnnnnnnnnnnnnnnnnnnnnnnnnnnnnnnnnnnnnnnnnnnnnnnnnnnnnnnnnnnnnnnnnnnnnnnnnnnnnnnnnnnnnnnnnnnnnnnnnnnnnnnnnnnnnnnnnnnnnnnnnnnnnnnnnnnnnnnnnnnnnnnnnnnnnnnnnnnnnnnnnnnnnnnnnnnnnnnnnnnnnnnnnnnnnnnnnnnnnnnnnnnnnnnnnnnnnnnnnnnnnnnnntgttctaaatttcagtttcctgcatgaaaattttgtcaagtactctattaaggtagannnnnnnnnnnnnnnnnnnnnnnnnnnnnnnnngtagtttttcaccaaacaatgtctcttatgtaattcatcttcaatccactggatacccaataaacttgccccagaaaccttaaatctgtgcttacagagaggccagcttcccttcttgttaacccataggagattctgaattagggcaagcacaaaagatagcacaatagacatcctttgccttttcgtacagtgttcacatacagtaactcaactagtcttgtaagaatgctttgtgatagaccaggcagccttctttcccctatagaaatatatatatatttnnnnnnnnnnnnnnnnnnnnnnnnnnnnnnnnnnnnnnnnnnnnnnnnnnnnnnnnnnnnnnnnnnnnnnnnnnnnnnnnnnnnnntaagttcacatctccagaatccaacttaaatgttttctttgtcttaatactctacttctctaaagtgattatcaccaatgtaatgatatagagacacagcaagaccctttccttctcacctaatgtatagagcaatgcagagatagaatgatgggctataacaatcatataattgaaagaaagaacttcaaaaataatcaagttcagctgtttgacttataaatgtgataactaaaacctagagaggaaaagaggtactcaagatcacacagtaggagaggactgcagaaacaccaaacccaagctcttttgtccactcttccagcgttctttctactatactgcctatcctttatctagttaccaataaataacaaaagcttggaccacaatgcttttattgtctaggaaactcctgaagaagctaaataaaatgggtggggaatattgtaaatgtaattcaggctggattaagaaagaacttatttgtacattgtaactgacaagcacctgcaatgctgaaaggaatttttcattggcttgctgtttgctggctgcatcaaagccctgtctctaggacatgtctctgaacattgtgtgtagcatggctttcatttcttttaggataaaattcaaaaccctttatctggttggtaaacctctgcctaattgggaaccttctttctccacaactccatattgtacactccaatttcatctctgttctccaaccatggaagctatttgtcatgattcctccttgtgtcattttttttctgtcaaccttggggcttttgtgtttgctgttcacttcacctcctnnnnnnnnnnnnnnnnnnnnnnnnnnnnnnnnnnnnnnnnnnnnnnnnnngagaaacctactttgattttcttggtccacaacggttctctggatgtgaactcttatagcacataattttcacttttttccacaaaactcgctcctatcacctgttacaagcatttacctctgataacaagaactttcaaatatctagctgtcatgtaagcacttttcataaacattaagagtatctgtgacacttatgtgtaatgtttcgtatctctgaaattgatatttaccagtcatttatcttggctaccaactaacaactatccatattatctgtaccaatcagatgtataatcacaattttgtgtgacagaaaatggctaaacttgatccaaggctattacatgctttatcaactgcacaatctttatatatgtcaattattgatctttaactgatttccttcttatggattttctcctctgcttatcatgtatgcctaacatgacaaaaaagagcctatcattgcagccagtatgataatactcagtctgtggggcttcttatttgcttattccatcatcatctgtcctgcttgatgtctttgcctatgcacaatcatatgacccatcacatctgtatgaagagctggatgactaggattaatattctattttaggttcttattcagcagaaatattagataatcaatgtctttttattcctgtaggtgtgaaatccagacaattgaagatggggcatatcagagcctaagccacctctctaccttaatattgacaggaaaccccatccagagtttagccctgggagccttttctggactatcaagtttacagaagctggtggctgtggagacaaatctagcatctctagagaacttccccattggacatctcaaaactttgaaagaacttaatgtggctcacaatcttatccaatctttcaaattacctgagtatttttctaatctgaccaatctagagcacttggacctttccagcaacaagattcaaagtatttattgcacagacttgcgggttctacatcaaatgcccctactcaatctctctttagacctgtccctgaatcctatgaactttatccaaccaggtgcatttaaagaaattaggcttcataagctgactttaagaaataattttgatagtttaaatgtaatgaaaacttgtattcaaggtctggctggtttagaagtccatcgtttggttctgggagaatttagaaatgaaggaaacttggaaaagtttgacaaatctgctctagagggcctgtgcaatttgaccattgaagaattccgattagcatacttagactactacctcgatgatattattgacttatttaattgtttgacaaatgtttcttcattttccctggtgagtgtgactattgaaagggtaaaagacttttcttataatttcggatggcaacatttagaattagttaactgtaaatttggacagtttcccacattgaaactcaaatctctcaaaaggcttactttcacttccaacaaaggtgggaatgctttttcagaagttgatctaccaagccttgagtttctagatctcagtagaaatggcttgagtttcaaaggttgctgttctcaaagtgattttgggacaaccagcctaaagtatttagatctgagcttcaatggtgttattaccatgagttcaaacttcttgggcttagaacaactagaacatctggatttccagcattccaatttgaaacaaatgagtgagttttcagtattcctatcactcagaaacctcatttaccttgacatttctcatactcacaccagagttgctttcaatggcatcttcaatggcttgtccagtctcgaagtcttgaaaatggctggcaattctttccaggaaaacttccttccagatatcttcacagagctgagaaacttgaccttcctggacctctctcagtgtcaactggagcagttgtctccaacagcatttaactcactctccagtcttcaggtactaaatatgagccacaacaacttcttttcattggatacgtttccttataagtgtctgaactccctccaggttcttgattacagtctcaatcacataatgacttccaaaaaacaggaactacagcattttccaagtagtctagctttcttaaatcttactcagaatgactttgcttgtacttgtgaacaccagagtttcctgcaatggatcaaggaccagaggcagctcttggtggaagttgaacgaatggaatgtgcaacaccttcagataagcagggcatgcctgtgctgagtttgaatatcacctgtcagatgaataagaccatcattggtgtgtcggtcctcagtgtgcttgtagtatctgttgtagcagttctggtctataagttctattttcacctgatgcttcttgctggctgcataaagtatggtagaggtgaaaacatctatgatgcctttgttatctactcaagccaggatgaggactgggtaaggaatgagctagtaaagaatttagaagaaggggtgcctccatttcagctctgccttcactacagagactttattcccggtgtggccattgctgccaacatcatccatgaaggtttccataaaagccgaaaggtgattgttgtggtgtcccagcacttcatccagagccgctggtgtatctttgaatatgagattgctcagacctggcagtttctgagcagtcgtgctggtatcatcttcattgtcctgcagaaggtggagaagaccctgctcaggcagcaggtggagctgtaccgccttctcagcaggaacacttacctggagtgggaggacagtgtcctggggcggcacatcttctggagacgactcagaaaagccctgctggatggtaaatcatggaatccagaaggaacagtgggtacaggatgcaattggcaggaagcaacatctatctgaagaggaaaaataaaaacctcctgaggcatttcttgcccagctgggtccaacacttgttcagttaataagtattaaatgctgccacatgtcaggccttatgctaagggtgagtaattccatggtgcactagatatgcagggctgctaatctcaaggagcttccagtgcagagggaataaatgctagactaaaatacagagtcttccaggtgggcatttcaaccaactcagtcaaggaacccatgacaaagaaagtcatttcaactcttacctcatcaagttgaataaagacagagaaaacagaaagagacattgttcttttcctgagtcttttgaatggaaattgtattatgttatagccatcataaaaccattttggtagttttgactgaactgggtgttcactttttcctttttgattgaatacaatttaaattctacttgatgactgcagtcgtcaaggggctcctgatgcaagatgccccttccattttaagtctgtctccttacagaggttaaagtctagtggctaattcctaaggaaacctgattaacacatgctcacaaccatcctggtcattctcgagcatgttctattttttaactaatcacccctgatatatttttatttttatatatccagttttcatttttttacgtcttgcctataagctaatatcataaataaggttgtttaagacgtgcttcaaatatccatattaaccactatttttcaaggaagtatggaaaagtacactctgtcactttgtcactcgatgtcattccaaagttattgcctactaagtaatgactgtcatgaaagcagcattgaaataatttgtttaaagggggcactcttttaaacgggaagaaaatttccgcttcctggtcttatcatggacaatttgggctagaggcaggaaggaagtgggatgacctcaggaggtcaccttttcttgattccagaaacatatgggctgataaacccggggtgacctcatgaaatgagttgcagcagaagtttatttttttcagaacaagtgatgtttgatggacctctgaatctctttagggagacacagatggctgggatccctcccctgtacccttctcactgccaggagaactacgtgtgaaggtattcaaggcagggagtatacattgctgtttcctgttgggcaatgctccttgaccacattttgggaagagtggatgttatcattgagaaaacaatgtgtctggaattaatggggttcttataaagaaggttcccagaaaagaatgttcatccagcctcctcagaaacagaacattcaagaaaaggacaatcaggatgtcatcagggaaatgaaaactaaaaaccacaatgagatatcaccttataccaggtagaatggctacctttaaaaaaatgaagtgtcatccaggatatagagaaattaggaacccttcttcactgctggagggaatggaaaatggtgtagccgttatgaaaaacagtacggaggtttctcaaa

SEQ ID NO: 262 - DNA, 951 bp, Homo sapiens
  misc_feature: Incyte ID No: 004360.1
  unsure 777-795: a, t, c, g, or other
gcgaacgctacaaggaaactagctgttatacattccctctccggattatctcaagccctttgtgaacagagtgaattggatgacttagaatatatatatgacctcttctcagttattatacacaaaggtggctgctacggaggccattaccatgtatatattaaagatgttgatcatttgggaaactggcagtttcaagaggaaaaaagtaaaccagatgtgaatctgaaagatctccagagtgaagaagagattgatcatccactgatgattctaaaagcaatcttattagaggaggagaataatctaattcctgttgatcagctgggccagaaacttttgaaaaagataggaatatcttggaacaagaagtacagaaaacagcatggaccattgcggaagttcttacagctccattctcagatatttctactcagttcagatgaaagtacagttcgtctcttgaagaatagttctctccaggctgagtctgatttccaaaggaatgaccagcaaattttcaagatgcttcctccagaatccccaggtttaaacaatagcatctcctgtccccactggtttgatataaatgattctaaagtccagccaatcagggaaaaggatattgaacagcaatttcagggtaaagaaagtgcctacatgttgttttatcggaaatcccagttgcagagaccccctgaaggtatggaaagaaaaatgttcctatttgtttcagttaatggctttagaagataaacatggaatgctgtttgaatnnnnnnnnnnnnnnnnnnnggtttactcttggaacatttttaaatattttaaagctaacaagaactatattatgccaaatgaaatctaacaatttgtcattttataaagattatatacttctctttaattttctaccctgtaataatgtaagatcatcattacattttcaaaatt

SEQ ID NO: 263 - DNA, 12494 bp, Homo sapiens
  misc_feature: Incyte ID No: 412661.2
ctaccgggcggaggtgagcgcggcgccggctcctcctgcggcggactttgggtgcgacttgacgagcggtggttcgacaagtggccttgcgggccggatcgtcccagtggaagagttgtaaatttgcttctggccttcccctacggattatacctggccttcccctacggattatactcaacttactgtttagaaaatgtggcccacgagacgcctggttactatcaaaaggagcggggtcgacggtccccactttcccctgagcctcagcacctgcttgtttggaaggggtattgaatgtgacatccgtatccagcttcctgttgtgtcaaaacaacattgcaaaattgaaatccatgagcaggaggcaatattacataatttcagttccacaaatccaacacaagtaaatgggtctgttattgatgagcctgtacggctaaaacatggagatgtaataactattattgatcgttccttcaggtatgaaaatgaaagtcttcagagtggaaggaagtcaactgaatttccaagaaaaatacgtgaacaggagccagcacgtcgtgtctcaagatctagcttctcttctgaccctgatgagaaagctcaagattccaaggcctattcaaaaatcactgaaggaaaagtttcaggaaatcctcaggtacatatcaagaatgtcaaagaagacagtaccgcagatgactcaaaagacagtgttgctcagggaacaactaatgttcattcctcagaacatgctggacgtaatggcagaaatgcagctgatcccatttctggggattttaaagaaatttccagcgttaaattagtgagccgttatggagaattgaagtctgttcccactacacaatgtcttgacaatagcaaaaaaaatgaatctcccttttggaagctttatgagtcagtgaagaaagagttggatgtaaaatcacaaaaagaaaatgtcctacagtattgtagaaaatctggattacaaactgattacgcaacagagaaagaaagtgctgatggtttacagggggagacccaactgttggtctcgcgtaagtcaagaccaaaatctggtgggagcggccacgctgtggcagagcctgcttcacctgaacaagagcttgaccagaacaaggggaagggaagagacgtggagtctgttcagactcccagcaaggctgtgggcgccagctttcctctctatgagccggctaaaatgaagacccctgtacaatattcacagcaacaaaattctccacaaaaacataagaacaaagacctgtatactactggtagaagagaatctgtgaatctgggtaaaagtgaaggcttcaaggctggtgataaaactcttactcccaggaagctttcaactagaaatcgaacaccagctaaagttgaagatgcagctgactctgccactaagccagaaaatctctcttccaaaaccagaggaagtattcctacagatgtggaagttctgcctacggaaactgaaattcacaatgagccatttttaactctgtggctcactcaagttgagaggaagatccaaaaggattccctcagcaagcctgagaaattgggcactacagctggacagatgtgctctgggttacctggtcttagttcagttgatatcaacaactttggtgattccattaatgagagtgagggaatacctttgaaaagaaggcgtgtgtcctttggtgggcacctaagacctgaactatttgatgaaaacttgcctcctaatacgcctctcaaaaggggagaagccccaaccaaaagaaagtctctggtaatgcacactccacctgtcctgaagaaaatcatcaaggaacagcctcaaccatcaggaaaacaagagtcaggttcagaaatccatgtggaagtgaaggcacaaagcttggttataagccctccagctcctagtcctaggaaaactccagttgccagtgatcaacgccgtaggtcctgcaaaacagcccctgcttccagcagcaaatctcagacagaggttcctaagagaggagggagaaagagtggcaacctgccttcaaagagagtgtctatcagccgaagtcaacatgatattttacagatgatatgttccaaaagaagaagtggtgcttcggaagcaaatctgattgttgcaaaatcatgggcagatgtagtaaaacttggtgcaaaacaaacacaaactaaagtcataaaacatggtcctcaaaggtcaatgaacaaaaggcaaagaagacctgctactccaaagaagcctgtgggcgaagttcacagtcaatttagtacaggccacgcaaactctccttgtaccataataatagggaaagctcatactgaaaaagtacatgtgcctgctcgaccctacagagtgctcaacaacttcatttccaaccaaaaaatggactttaaggaagatctttcaggaatagctgaaatgttcaagaccccagtgaaggagcaaccgcagttgacaagcacatgtcacatcgctatttcaaattcagagaatttgcttggaaaacagtttcaaggaactgattcaggagaagaacctctgctccccacctcagagagttttggaggaaatgtgttcttcagtgcacagaatgcagcaaaacagccatctgataaatgctctgcaagccctcccttaagacggcagtgtattagagaaaatggaaacgtagcaaaaacgcccaggaacacctacaaaatgacttctctggagacaaaaacttcagatactgagacagagccttcaaaaacagtatccactgcaaacaggtcaggaaggtctacagagttcaggaatatacagaagctacctgtggaaagtaagagtgaagaaacaaatacagaaattgttgagtgcatcctaaaaagaggtcagaaggcaacactactacaacaaaggagagaaggagagatgaaggaaatagaaagaccttttgagacatataaggaaaatattgaattaaaagaaaacgatgaaaagatgaaagcaatgaagagatcaagaacttgggggcagaaatgtgcaccaatgtctgacctgacagacctcaagagcttgcctgatacagaactcatgaaagacacggcacgtggccagaatctcctccaaacccaagatcatgccaaggcaccaaagagtgagaaaggcaaaatcactaaaatgccctgccagtcattacaaccagaaccaataaacaccccaacacacacaaaacaacagttgaaggcatccctggggaaagtaggtgtgaaagaagagctcctagcagtcggcaagttcacacggacgtcaggggagaccacgcacacgcacagagagccagcaggagatggcaagagcatcagaacgtttaaggagtctccaaagcagatcctggacccagcagcccgtgtaactggaatgaagaagtggccaagaacgcctaagaaagaggcccagtcactagaagacctggctggcttcaaagagctcttccagacaccaggtccctctgaggaatcaatgactgatgagaaaactaccaaaatagcctgcaaatctccaccaccagaatcagtggacactccaacaagcacaaagcaatggcctaagagaagtctcaggaaagcagatgtagaggaagaattcttagcactcaggaaactaacaccatcagcagggaaagccatgcttacgcccaaaccagcaggaggtgatgagaaagacattaaagcatttatgggaactccagtgcagaaactggacctggcaggaactttacctggcagcaaaagacagctacagactcctaaggaaaaggcccaggctctagaagacctggctggctttaaagagctcttccagactcctggtcacaccgaggaattagtggctgctggtaaaaccactaaaataccctgcgactctccacagtcagacccagtggacaccccaacaagcacaaagcaacgacccaagagaagtatcaggaaagcagatgtagagggagaactcttagcgtgcaggaatctaatgccatcagcaggcaaagccatgcacacgcctaaaccatcagtaggtgaagagaaagacatcatcatatttgtgggaactccagtgcagaaactggacctgacagagaacttaaccggcagcaagagacggccacaaactcctaaggaagaggcccaggctctggaagacctgactggctttaaagagctcttccagacccctggtcatactgaagaagcagtggctgctggcaaaactactaaaatgccctgcgaatcttctccaccagaatcagcagacaccccaacaagcacaagaaggcagcccaagacacctttggagaaaagggacgtacagaaggagctctcagccctgaagaagctcacacagacatcaggggaaaccacacacacagataaagtaccaggaggtgaggataaaagcatcaacgcgtttagggaaactgcaaaacagaaactggacccagcagcaagtgtaactggtagcaagaggcacccaaaaactaaggaaaaggcccaacccctagaagacctggctggcttgaaagagctcttccagacaccagtatgcactgacaagcccacgactcacgagaaaactaccaaaatagcctgcagatcacaaccagacccagtggacacaccaacaagctccaagccacagtccaagagaagtctcaggaaagtggacgtagaagaagaattcttcgcactcaggaaacgaacaccatcagcaggcaaagccatgcacacacccaaaccagcagtaagtggtgagaaaaacatctacgcatttatgggaactccagtgcagaaactggacctgacagagaacttaactggcagcaagagacggctacaaactcctaaggaaaaggcccaggctctagaagacctggctggctttaaagagctcttccagacacgaggtcacactgaggaatcaatgactaacgataaaactgccaaagtagcctgcaaatcttcacaaccagacctagacaaaaacccagcaagctccaagcgacggctcaagacatccctggggaaagtgggcgtgaaagaagagctcctagcagttggcaagctcacacagacatcaggagagactacacacacacacacagagccaacaggagatggtaagagcatgaaagcatttatggagtctccaaagcagatcttagactcagcagcaagtctaactggcagcaagaggcagctgagaactcctaagggaaagtctgaagtccctgaagacctggccggcttcatcgagctcttccagacaccaagtcacactaaggaatcaatgactaatgaaaaaactaccaaagtatcctacagagcttcacagccagacctagtggacaccccaacaagctccaagccacagcccaagagaagtctcaggaaagcagacactgaagaagaatttttagcatttaggaaacaaacgccatcagcaggcaaagccatgcacacacccaaaccagcagtaggtgaagagaaagacatcaacacgtttttgggaactccagtgcagaaactggaccagccaggaaatttacctggcagcaatagacggctacaaactcgtaaggaaaaggcccaggctctagaagaactgactggcttcagagagcttttccagacaccatgcactgataaccccacgactgatgagaaaactaccaaaaaaatactctgcaaatctccgcaatcagacccagcggacaccccaacaaacacaaagcaacggcccaagagaagcctcaagaaagcagacgtagaggaagaatttttagcattcaggaaactaacaccatcagcaggcaaagccatgcacacgcctaaagcagcagtaggtgaagagaaagacatcaacacatttgtggggactccagtggagaaactggacctgctaggaaatttacctggcagcaagagacggccacaaactcctaaagaaaaggccaaggctctagaagatctggctggcttcaaagagctcttccagacaccaggtcacactgaggaatcaatgaccgatgacaaaatcacagaagtatcctgcaaatctccacaaccagacccagtcaaaaccccaacaagctccaagcaacgactcaagatatccttggggaaagtaggtgtgaaagaagaggtcctaccagtcggcaagctcacacagacgtcagggaagaccacacagacacacagagagacagcaggagatggaaagagcatcaaagcgtttaaggaatctgcaaagcagatgctggacccagcaaactatggaactgggatggagaggtggccaagaacacctaaggaagaggcccaatcactagaagacctggccggcttcaaagagctcttccagacaccagaccacactgaggaatcaacaactgatgacaaaactaccaaaatagcctgcaaatctccaccaccagaatcaatggacactccaacaagcacaaggaggcggcccaaaacacctttggggaaaagggatatagtggaagagctctcagccctgaagcagctcacacagaccacacacacagacaaagtaccaggagatgaggataaaggcatcaacgtgttcagggaaactgcaaaacagaaactggacccagcagcaagtgtaactggtagcaagaggcagccaagaactcctaagggaaaagcccaacccctagaagacttggctggcttgaaagagctcttccagacaccaatatgcactgacaagcccacgactcatgagaaaactaccaaaatagcctgcagatctccacaaccagacccagtgggtaccccaacaatcttcaagccacagtccaagagaagtctcaggaaagcagacgtagaggaagaatccttagcactcaggaaacgaacaccatcagtagggaaagctatggacacacccaaaccagcaggaggtgatgagaaagacatgaaagcatttatgggaactccagtgcagaaattggacctgccaggaaatttacctggcagcaaaagatggccacaaactcctaaggaaaaggcccaggctctagaagacctggctggcttcaaagagctcttccagacaccaggcactgacaagcccacgactgatgagaaaactaccaaaatagcctgcaaatctccacaaccagacccagtggacaccccagcaagcacaaagcaacggcccaagagaaacctcaggaaagcagacgtagaggaagaatttttagcactcaggaaacgaacaccatcagcaggcaaagccatggacacaccaaaaccagcagtaagtgatgagaaaaatatcaacacatttgtggaaactccagtgcagaaactggacctgctaggaaatttacctggcagcaagagacagccacagactcctaaggaaaaggctgaggctctagaggacctggttggcttcaaagaactcttccagacaccaggtcacactgaggaatcaatgactgatgacaaaatcacagaagtatcctgtaaatctccacagccagagtcattcaaaacctcaagaagctccaagcaaaggctcaagatacccctggtgaaagtggacatgaaagaagagcccctagcagtcagcaagctcacacggacatcaggggagactacgcaaacacacacagagccaacaggagatagtaagagcatcaaagcgtttaaggagtctccaaagcagatcctggacccagcagcaagtgtaactggtagcaggaggcagctgagaactcgtaaggaaaaggcccgtgctctagaagacctggttgacttcaaagagctcttctcagcaccaggtcacactgaagagtcaatgactattgacaaaaacacaaaaattccctgcaaatctcccccaccagaactaacagacactgccacgagcacaaagagatgccccaagacacgtcccaggaaagaagtaaaagaggagctctcagcagttgagaggctcacgcaaacatcagggcaaagcacacacacacacaaagaaccagcaagcggtgatgagggcatcaaagtattgaagcaacgtgcaaagaagaaaccaaacccagtagaagaggaacccagcaggagaaggccaagagcacctaaggaaaaggcccaacccctggaagacctggccggcttcacagagctctctgaaacatcaggtcacactcaggaatcactgactgctggcaaagccactaaaataccctgcgaatctcccccactagaagtggtagacaccacagcaagcacaaagaggcatctcaggacacgtgtgcagaaggtacaagtaaaagaagagccttcagcagtcaagttcacacaaacatcaggggaaaccacggatgcagacaaagaaccagcaggtgaagataaaggcatcaaagcattgaaggaatctgcaaaacagacaccggctccagcagcaagtgtaactggcagcaggagacagccaagagcacccagggaaagtgcccaagccatagaagacctagctggcttcaaagacccagcagcaggtcacactgaagaatcaatgactgatgacaaaaccactaaaataccctgcaaatcatcaccagaactagaagacaccgcaacaagctcaaagagacggcccaggacacgtgcccagaaagtagaagtgaaggaggagctgttagcagttggcaagctcacacaaacctcaggggagagcacgcacaccgacaaagagccggtaggtgagggcaaaggcacgaaagcatttaagcaacctgcaaagcggaagctggacgcagaagatgtaattggcagcaggagacagccaagagcacctaaggaaaaggcccaacccctggaagatctggccagcttccaagagctctctcaaacaccaggccacactgaggaactggcaaatggtgctgctgatagctttacaagcgctccaaagcaaacacctgacagtggaaaacctctaaaaatatccagaagagttcttcgggcccctaaagtagaacccgtgggagacgtggtaagcaccagagaccctgtaaaatcacaaagcaaaagcaacacttccctgcccccactgcccttcaagaggggaggtggcaaagatggaagcgtcacgggaaccaagaggctgcgctgcatgccagcaccagaggaaattgtggaggagctgccagccagcaagaagcagagggttgctcccagggcaagaggcaaatcatccgaacccgtggtcatcatgaagagaagtttgaggacttctgcaaaaagaattgaacctgcggaagagctgaacagcaacgacatgaaaaccaacaaagaggaacacaaattacaagactcagtccctgaaaataagggaatatccctgcgctccagacgccaaaataagactgaggcagaacagcaaataactgaggtctttgtattagcagaaagaatagaaataaacagaaatgaaaagaagcccatgaagacctccccagagatggacattcagaatccagatgatggagcccggaaacccatacctagagacaaagtcactgagaacaaaaggtgcttgaggtctgctagacagaatgagagctcccagcctaaggtggcagaggagagcggagggcagaagagtgcgaaggttctcatgcagaatcagaaagggaaaggagaagcaggaaattcagactccatgtgcctgagatcaagaaagacaaaaagccagcctgcagcaagcactttggagagcaaatctgtgcagagagtaacgcggagtgtcaagaggtgtgcagaaaatccaaagaaggctgaggacaatgtgtgtgtcaagaaaataagaaccagaagtcatagggacagtgaagatatttgacagaaaaatcgaactgggaaaaatataataaagttagttttgtgataagttctagtgcagtttttgtcataaattacaagtgaattctgtaagtaaggctgtcagtctgcttaagggaagaaaactttggatttgctgggtctgaatcggcttcataaactccactgggagcactgctgggctcctggactgagaatagttgaacaccgggggctttgtgaaggagtctgggccaaggtttgccctcagctttgcagaatgaagccttgaggtctgtcaccacccacagccaccctacagcagccttaactgtgacacttgccacactgtgtcgtcgtttgtttgcctatgtcctccagggcacggtggcaggaacaactatcctcgtctgtcccaacactgagcaggcactcggtaaacacgaatgaatggatgagcgcacggatgaatggagcttacaagatctgtctttccaatggccgggggcatttggtccccaaattaaggctattggacatctgcacaggacagtcctatttttgatgtcctttcctttctgaaaataaagttttgtgctttggagaatgactcgtgagcacatctttagggaccaagagtgactttctgtaaggagtgactcgtggcttgccttggtctcttgggaatacttttctaactagggttgctctcacctgagacattctccacccgcggaatctcagggtcccaggctgtgggccatcacgacctcaaactggctcctaatctccagctttcctgtcattgaaagcttcggaagtttactggctctgctcccgcctgttttctttctgactctatctggcagcccgatgccacccagtacaggaagtgacaccagtactctgtaaagcatcatcatccttggagagactgagcactcagcaccttcagccacgatttcaggatcgcttccttgtgagccgctgcctccgaaatctcctttgaagcccagacatctttctccagcttcagacttgtagatataactcgttcatcttcatttactttccactttgccccctgtcctctctgtgttccccaaatcagagaatagcccgccatcccccaggtcacctgtctggattcctccccattcacccaccttgccaggtgcaggtgaggatggtgcaccagacagggtagctgtcccccaaaatgtgccctgtgcgggcagtgccctgtctccacgtttgtttccccagtgtctggcggggagccaggtgacatcataaatacttgctgaatgaatgcagaaatcagcggtactgacttgtactatattggctgccatgatagggttctcacagcgtcatccatgatcgtaagggagaatgacattctgcttgagggagggaatagaaaggggcagggaggggacatctgagggcttcacagggctgcaaagggtacagggattgcaccagggcagaacaggggagggtgttcaaggaagagtggctcttagcagaggcactttggaaggtgtgaggcataaatgcttccttctacgtaggccaacctcaaaactttcagtaggaatgttgctatgatcaagttgttctaacactttagacttagtagtaattatgaacctcacatagaaaaatttcatccagccatatgcctgtggagtggaatattctgtttagtagaaaaatccttagagttcagctctaaccagaaatcttgctgaagtatgtcagcaccttttctcaccctggtaagtacagtatttcaagagcacgctaagggtggttttcattttacagggctgttgatgatgggttaaaaatgttcatttaagggctacccccgtgtttaatagatgaacaccacttctacacaaccctccttggtactgggggagggagagatctgacaaatactgcccattcccctaggctgactggatttgagaacaaataccaacccatttccaccatggtatggtaacttctgtgagcttcagtttccaagtgaatttccatgtaataggacattcccattaaatacaagctgtttttactttttcgcctcccagggcctgtgcgatctggtcccccagcctctcttgggctttcttacactaactctgtacctaccatctcctgcctcccttaggcaggcacctccaaccaccacacactccctgctgttttccctgcctggaactttccctcctgccccaccaagatcatttcatccagtcctgagctcagcttaagggaggcttcttgcctgtgggttccctcacccccatgcctgtcctccaggctggggcaggttcttagtttgcctggaattgttctgtacctctttgtagcacgtagtgttgtggaaactaagccactaattgagtttctggctcccctcctggggttgtaagttttgttcattcatgagggccgactgcatttcctggttactctatcccagtgaccagccacaggagatgtccaataaagtatgtgatgaaatggtctta

SEQ ID NO: 264 - DNA, 2264 bp, Homo sapiens
  misc_feature: Incyte ID No: 206310.2
  unsure 481-537, 1472, 1846-1848: a, t, c, g, or other
cagcgagcccttcagcccctcgctgcggccggagccccccaagcacccggagagcatcaaggcccccgtccacctgccccagcggccggaaatgaagcctgtggatgtcgggaggcctgtgatccggcccccagagcagaacgcaccgccaccaggggcccctgacaaggacaaacagaaacaggagccgaagactccagttgcgcccaaaaaggacctgaaaatcaagaacatgggctcctgggccagcctagtgcagaagcatccgaccaccccctcctccacagccaagtcatccagcgacagcttcgagcagttccgccgcgccgctcgggagaaagaggagcgtgagaaggccctgaaggctcaggccgagcacgctgagaaggagaaggagcggctgcggcaggagcgcatgaggagccgagaggacgaggatgcgctggagcaggcccggcgggcccatgaggaggcacgtcgnnnnnnnnnnnnnnnnnnnnnnnnnnnnnnnnnnnnnnnnnnnnnnnnnnnnnnnnnagcagctgcggtggctgccgccgccaccccacaggcccagagctcccagccccagtccatgctggaccagcagagggagttggcccggaagcgggagcaggagcgaagacgccgggaagccatggcagctaccattgacatgaatttccagagtgatctattgtcaatatttgaagaaaatcttttctgagcgcacctaggtggcttctgactttgattttctggcaaaacattgactttccatagtgttaggggcggtggtggaggtgggatcagcggccaggggatgcctcagggcctggccctcctgcatgctatgcccggggcaggcctgacgggcagctgaggattgcagagcctgtctgccttacggccagtcggacagacgtcccgccacccaccacccctcacaggacgtccgctcagcacacgccttgttacgagcaagtgccggctggacccaagccctgcatccccacatgcggggcagaggcccttctctccgccaaatgtctacacagtatacacaggacatcgttgctgccgccgtgactggttttctgtccccaagaacgtgacgttcgtgatgtcctgcccgccgggagtctttccccacaccccagccatcgccgcccgctcccaggaggccagggcaggcctgcgtgggctggaggcgggcgaggccggcccaccccctcgctggcactgactttgccttgaacagaccccccgaccctcccccacaagcctttaattgagagccgctctctgtaagtgtttgcttgtgcaaaagggaatagtgccgtggaggtgtgtgtgtccatggcatccggagcgaggcgactgtcctgcgtgggtagccctcggccggggagtgaggccaccaaccaaagtcagttccttcccacctgtgtttctgtttcgttttttttttncttttttttctatatatattttttgttgaattctattttatttttaattctctcttctcctccagacacaatggcactgcttatctccgaaatggtgtgatcgtctcctcattgagcagcggctgccaccgcgctgtgggtagtgtgtgaccgtggctgtactgtatagtgaacatagttggcatatctttgtttgaagtttgttggtgactccaccaaactggtgtgaaaaaagaaaaaagctcaaaaaaatccacaaaaagacaaaacacacaaaaaaaatcctgcctatattttactcagtttcaaactttattagtctatttttaattataaaaccagaaagctacaatttcttttctttcccctccacnnncccccccccacccatttgttggcttttttgttttttaatgtcagatctgttgagttggtttttttggttttggtttttgtttttgtttttgttttttactgagaaaggaagggccaagggatgaggtgggaaccgggccctgggggcgccacagactaaggcagagactcccctacctggcgcccagccccaaccagctggccgctcctgcccatgctttttttttttttttttttttaatttttataattggagcccctggtgaggttacgcgtgccatgagaacccactctacaccacgacgctggtgcctcagtgttggccaaactctggagtcactgactggtttgactttcatacggtgaatatgcatttggtctgtactgatcatggaataaacacatctctcttttttt

SEQ ID NO: 265 - DNA, 1497 bp, Homo sapiens
  misc_feature: Incyte ID No: 346599.14c
  unsure 7: a, t, c, g, or other
ttttttnttttttttgcgtgaaacttggtgaatctttattaaactagggtccaccccaggaggacggctggggcggggacagggtctcccgctgcaggctgcgcggaggcaggaggcacggggtggcgtggggtcgcatggctgcaggcttcggcgttcagtgattgtcgctgggcacaggggcggcgctggtgcccacggcagcctgcaccttctccaccagcccggcccactggcgctgcatgtcttccaccaggggctcgaaccagctcttgaggcgggcctggaaggcctcggcctgcaggcgtatctgctgggcctgctcctccagcttggcgcgcacctccgccacctgctccttcacctcgtccaggcggtcgcgggtccggctgcccatctcctccatccgcgcgcgcagccgctcgccccaggcctgggcccgctcctgtagcggctggccggccagggagcccacagtggcggcccgcacgcggccctgttccaccaggggccccaggcgctcgcggatggcgctgaggccgcgctcggcgccctcgcgggccccggcctggtacactgccaggcgcttctgcaggtcatcggcatcgcggaggagccgcttacgcagcttgcgcaggtgggaggcgaggcgcacccgcagctcctcggtgctctggccgagcatggcctgcacctcgccgcggtactgcaccaggcggccgcacacgtcctccatgtccgcgcccagccgggcctgcgccgcctgcagctccttggacagccgtgcccgcgtctcctccgccaccggggtcagttgttcctccagttccgatttgtaggccttcaactccttcatggtctcgtccatcagcgccctcagttcctgggtgacctgggagctgagcagctcctcctgcacctgctcagacagtgtctgcacccagcgcaggtaatcccaaaagcgacccagtgccagttcccagcgctggccgctctgccactcggtcctgctggcgcagctcgggctccggctctgtctccaccgcttgctccaccttgggcctggcatcctgcccaggaatgtgaccagcaacgcagcccacagaaccttcatcttcctgcctgtgattggccagtcggctcctggggaaggacgtccttcacctccgctggggctgagtaggactcaaggatcccagacttgtccaattatagggctccccctgtcccgccccctcccccagggatagggcgggctgggccagcccccagtcacgaggtgggctgttctccccctgccccaggcacagcagggcagagggaggaaggaggtggggcatagaggtcttttgaccaccccccacagtccccaggaagggaggacacctcgcccagtaatacagacaccctcctccattctgggggccaagcgtggaaggggaatgtggaggctgccgcccagagtcctcctttcctgaccctgtcctttcctgtgcc

SEQ ID NO: 266 - DNA, 4423 bp, Homo sapiens
  misc_feature: Incyte ID No: 385608.47
cgcccccccgcttccccgcacgcgctctccagccgcggccgcccgcctgccgcggtcaccccggcctctgcctctgtcccccagtgatcggatcaaggcgctgagcgaggccctgcctgcggggcggccatgcggcggtgacaggagcgcgaccgacacgcacgggcccctcgccccctctcgcctcccgtccgctcgccagctcccctcagccgaggctgctccgcggcggccgcagcccgcgcgcggcccacactcgcctcccctcggcacccccggccccggagctgcctggaggcggccgcactcggggatcatggcccaagttgcaatgtccaccctccccgttgaagatgaggagtcctcggagagcaggatggtggtgacattcctcatgtcagctctcgagtccatgtgtaaagaactggccaagtccaaagccgaagtggcctgcattgcagtgtatgaaacagacgtgtttgtcgtcggaactgaaagaggacgtgcttttgtcaataccagaaaggattttcaaaaagattttgtaaaatattgtgttgaagaagaagaaaaagctgcagagatgcataaaatgaaatctacaacccaggcaaatcggatgagtgtagatgctgtagaaattgaaacactcagaaaaacagttgaggactatttctgcttttgctatgggaaagctttaggcaaatccacagtggtacctgtaccatatgagaagatgctgcgagaccagtcggctgtggtagtgcaggggcttccggaaggtgttgcctttaaacaccccgagaactatgatcttgcaaccctgaaatggattttggagaacaaagcagggatttcattcatcattaagagaccttttttagagccaaagaagcatgtaggtggtcgtgtgatggtaacagatgctgacaggtcaatactatctccaggtggaagttgtggccccatcaaagtgaaaactgaacccacagaagattctggcatttccctggaaatggcagctgtgacagtaaaggaagaatcagaagatcctgattattatcaatataacattcaaggaagccaccattcttcagagggcaatgaaggcacagaaatggaagtaccagcagaagattctactcaacatgtcccttcagaaacaagtgaggaccctgaagttgaggtgactattgaagatgatgattattctccaccgtctaagagaccaaaggccaatgagctaccgcagccaccagtcccggaacccgccaatgctgggaagcggaaagtgagggagttcaacttcgagaaatggaatgctcgcatcactgatctacgtaaacaagttgaagaattgtttgaaaggaaatatgctcaagccataaaagccaaaggtccggtgacgatcccgtaccctcttttccagtctcatgttgaagatctttatgtagaaggacttcctgaaggaattcctttagaaggccatctacttacggaattcctcgcctggagaggatattacttgcaaaggaaaggattcgttttgtgattaagaaacatgagcttctgaattcaacacgtgaagatttacagcttgataagccagcttcaggagtaaaggaagaatggtatgccagaatcactaaattaagaaagatggtggatcagcttttctgcaaaaaatttgcggaagccttggggagcactgaagccaaggctgtaccgtaccaaaaatttgaggcacacccgaatgatctgtacgtggaaggactgccagaaaacattcctttccgaagtccctcatggtatggaatcccaaggctggaaaaaatcattcaagtgggcaatcgaattaaatttgttattaaaagaccagaacttctgactcacagtaccactgaagttactcagccaagaacgaatacaccagtcaaggaagattggaatgtcagaattaccaagctacggaagcaagtggaagagatttttaatttgaaatttgctcaagctcttggactcaccgaggcagtaaaagtaccatatcctgtgtttgaatcaaacccggagttcttgtatgtggaaggcttgccagaggggattcccttccgaagccctacctggtttggaattccacgacttgaaaggatcgtccgcgggagtaataaaatcaagttcgttgttaaaaaacctgaactagttatttcctacttgcctcctgggatggctagtaaaataaacactaaagctttgcagtcccccaaaagaccacgaagtcctgggagtaattcaaaggttcctgaaattgaggtcaccgtggaaggccctaataacaacaatcctcaaacctcagctgttcgaaccccgacccagactaacggttctaacgttcccttcaagccacgagggagagagttttcctttgaggcctggaatgccaaaatcacggacctaaaacagaaagttgaaaatctcttcaatgagaaatgtggggaagctcttggccttaaacaagctgtgaaggtgccgttcgcgttatttgagtctttcccggaagacttttatgtggaaggcttacctgagggtgtgccattccgaagaccatcgacttttggcattccgaggctggagaagatactcagaaacaaagccaaaattaagttcatcattaaaaagcccgaaatgtttgagacggcgattaaggagagcacctcctctaagagccctcccagaaaaataaattcatcacccaatgttaatactactgcatcaggtgttgaagaccttaacatcattcaggtgacaattccagatgatgataatgaaagactctcgaaagttgaaaaagctagacagctaagagaacaagtgaatgacctctttagtcggaaatttggtgaagctattggtatgggttttcctgtgaaagttccctacaggaaaatcacaattaaccctggctgtgtggtggttgatggcatgcccccgggggtgtccttcaaagcccccagctacctggaaatcagctccatgagaaggatcttagactctgccgagtttatcaaattcacggtcattagaccatttccaggacttgtgattaataaccagctggttgatcagagtgagtcagaaggccccgtgatacaagaatcagctgaaccaagccagttggaagttccagccacagaagaaataaaagagactgatggaagctctcagatcaagcaagaaccagaccccacgtggtagacctcttccctcctaggcttaaagtatcagtggttgagaagagcttttcggacctgttactaccccaagctgtgtaatatacttgtataacagaaataccttctatacaaacctttttttctacttttagatagaaatgtctactttttcagcagttctgtgaattaaagagcagagtgactgtgggtctggaatggctggtgtacttgggaatgtactatcaggattttacagcaatgctgggaaatgacagggaaaatgacaggaatgaatctcaccagattttttatgtactcagcagagccttgagttacggtgtttattttccaatcaagtgaagatatctcctacttctcctactggaacatctcagcttctgcagtgaagaaaaattcctgtgatagttcagttctttagtttttctatttgaaaaaaaaaaatcatttaaatgatcctttgttcacggctctccttaatgactgagtgaacagttcctatctgtatatttgactaaaccttttcctaagctatctctcatggttcctatgtttttttatcataatttaaagcaaaaccatctggatcacctaacagtcagaggtcagtatctcagcgtgtgaattatagaggaaatacagagagaacctcttccacttttacttttcgtccaaataaaatgcatggtgtaccagaagttgaagatcgggttgaggattggggctagctcgatgacactaaggccccaacatcgcgggacctgctgtggcgcggattcttaggaacgctgttctagccggccccctctccaggggtcgccgtggccggcattatttcctagttcttcttgtaaccctgaggtgccagcgcggggagtgaggaggggtcagggggctaaggatgcaacctctgacgttctgcgccttcctaggagagtcttacatgtgttgagatttcacaagcaatgcgagttgtaaaataccagctctacaagaagctaggctctgtgacggcatagttttcagtagctttatcacaatattcacaatggagaattatatgacatggtagcagaaataggcccttttatgtgttgcttctattttacctcaaattgtagatatagggtaatcaataaaatccatccatgcctttcacacactaaaaagtcgga

SEQ ID NO: 267 - DNA, 4676 bp, Homo sapiens
  misc_feature: Incyte ID No: 385608.2
  unsure 1385-1680, 4519, 4618: a, t, c, g, or other
cccggctgcagccgggagggggccgaggagtgactgagccccgggctgtgcagtccgacgccgactgaggcacgagcgggtgacgctgggcctgcagcgcggagcagaaagcagaacccgcagagtcctccctgctgctgtgtggacgacacgtggggcacaggcagaagtgggccctgtgaccagctgcactggtttcgtggaaggaagctccaggactggcgggatgggctcagcctgtatcaaagtcaccaaatactttctcttcctcttcaacttgatcttctttatcctgggcgcagtgatcctgggcttcggggtgtggatcctggccgacaagagcagtttcatctctgtcctgcaaacctcctccagctcgcttaggatgggggcctatgtcttcatcggcgtgggggcagtcactatgctcatgggcttcctgggctgcatcggcgccgtcaacgaggtccgctgcctgctggggctgtactttgctttcctgctcctgatcctcattgcccaggtgacggccggggccctcttctacttcaacatgggcaagctgaagcaggagatgggcggcatcgtgactgagctcattcgagactacaacagcagtcgcgaggacagcctgcaggatgcctgggactacgtgcaggctcaggtgaagtgctgcggctgggtcagcttctacaactggacagacaacgctgagctcatgaatcgccctgaggtcacctacccctgttcctgcgaagtcaagggggaagaggacaacagcctttctgtgaggaagggcttctgcgaggcccccggcaacaggacccagagtggcaaccaccctgaggactggcctgtgtaccaggagggctgcatggagaaggtgcaggcgtggctgcaggagaacctgggcatcatcctcggcgtgggcgtgggtgtggccatcgtcgagctcctggggatggtcctgtccatctgcttgtgccggcacgtccattccgaagactacagcaaggtccccaagtactgaggcagctgctatccccatctccctgcctggcccccaacctcagggctcccaggggtctccctggctccctcctccaggcctgcctcccacttcactgcgaagaccctcttgcccaccctgactgaaagtagggggctttctggggcctagcgatctctcctggcctatccgctgccagccttgagccctggctgttctgtggttcctctgctcaccgcccatcagggttctcttagcaactcagagaaaaatgctccccacagcgtccctggcgcaggtgggctggacttctacctgccctcaagggtgtgtatattgtataggggcaactgtatgaaaaattggggaggagggnnnnnnnnnnnnnnnnnnnnnnnnnnnnnnnnnnnnnnnnnnnnnnnnnnnnnnnnnnnnnnnnnnnnnnnnnnnnnnnnnnnnnnnnnnnnnnnnnnnnnnnnnnnnnnnnnnnnnnnnnnnnnnnnnnnnnnnnnnnnnnnnnnnnnnnnnnnnnnnnnnnnnnnnnnnnnnnnnnnnnnnnnnnnnnnnnnnnnnnnnnnnnnnnnnnnnnnnnnnnnnnnnnnnnnnnnnnnnnnnnnnnnnnnnnnnnnnnnnnnnnnnnnnnnnnnnnnnnnnnnnnnnnnnnnnnnnnnctcagaaaaacagttgaggactatttctgcttttgctatgggaaagctttaggcaaatccacagtggtacctgtaccatatgagaagatgctgcgagaccagtcggctgtggtagtgcaggggcttccggaaggtgttgcctttaaacaccccgagaactatgatcttgcaaccctgaaatggattttggagaacaaagcagggatttcattcatcattaagagaccttttttagagccaaagaagcatgtaggtggtcgtgtgatggtaacagatgctgacaggtcaatactatctccaggtggaagttgtggccccatcaaagtgaaaactgaacccacagaagattctggcatttccctggaaatggcagctgtgacagtaaaggaagaatcagaagatcctgattattatcaatataacattcaaggaagccaccattcttcagagggcaatgaaggcacagaaatggaagtaccagcagaagatgatgattattctccaccgtctaagagaccaaaggccaatgagctaccgcagccaccagtcccggaacccgccaatgctgggaagcggaaagtgagggagttcaacttcgagaaatggaatgctcgcatcactgatctacgtaaacaagttgaagaattgtttgaaaggaaatatgctcaagccataaaagccaaaggtccggtgacgatcccgtaccctcttttctagtctcatgttgaagatctttatgtagaaggacttcctgaaggaattccttttagaaggccatctacttacggaattcctcgcctggagaggatattacttgcaaaggaaaggattcgttttgtgattaagaaacatgagcttctgagttcaacacgtgaagatttacagcttgataagccagcttcaggagtaaaggaagaatggtatgccagaatcactaaattaagaaagatggtggatcagcttttctgcaaaaaatttgcggaagccttggggagcactgaagccaaggctgtaccgtaccaaaaatttgaggcacacccgaatgatctgtacgtggaaggactgccagaaaacattcctttccgaagtccctcatggtatggaatcccaaggctggaaaaaaatcattcaagtgggcaatcgaattaaatttgttattaaaagaccagaacttctgactcacagtaccactgaagttactcagccaagaacgaatacaccagtcaaagaagattggaatgtcagaattaccaagctacggaagcaagtggaagagatttttaatttgaaatttgctcaagctcttggactcaccgaggcagtaaaagtaccatatcctgtgtttgaatcaaacccggagttcttgtatgtggaaggcttgccagaggggattcccttccgaagccctacctggtttggaattccacgacttgaaaggatcgtccgcgggagtaataaaatcaagttcgttgttaaaaaacctgaactagttatttcctacttgcctcctgggatggctagtaaaataaacactaaagctttgcagtcccccaaaagaccacgaagtcctgggagtaattcaaaggttcctgaaattgaggtcaccgtggaaggccctaataacaacaatcctcaaacctcagctgttcgaaccccgacccagactaacggttctaacgttcccttcaagccacgagggagagagttttcctttgaggcctggaatgccaaaatcacggacctaaaacagaaagttgaaaatctcttcaatgagaaatgtggggaagctcttggccttaaacaagctgtgaaggtgccgttcgcgttatttgagtctttcccggaagacttttatgtggaaggcttacctgagggtgtgccattccgaagaccatcgacttttggcattccgaggctggagaagatactcagaaacaaagccaaaattaagttcatcattaaaaagcccgaaatgtttgagacggcgattaaggagagcacctcctctaagagccctcccagaaaaataaattcatcacccaatgttaatactactgcatcaggtgttgaagaccttaacatcattcaggtgacaattccagatgatgataatgaaagactctcgaaagttgaaaaagctagacagctaagagaacaagtgaatgacctctttagtcggaaatttggtgaagctattggtatgggttttcctgtgaaagttccctacaggaaaatcacaattaaccctggctgtgtggtggttgatggcatgcccccgggggtgtccttcaaagcccccagctacctggaaatcagctccatgagaaggatcttagactctgccgagtttatcaaattcacggtcattagaccatttccaggacttgtgattaataaccagctggttgatcagagtgagtcagaaggccccgtgatacaagaatcagctgaaccaagccagttggaagttccagccacagaagaaataaaagagactgatggaagctctcagatcaagcaagaaccagaccccacgtggtagacctcttccctccaaggcttaaagtatcagtggttgagaagagcttttcggacctgttactaccccaagctgtagccttgagttacggtgtttattttccaatcaagtgaagatatctcctacttctcctactggaacatctcagcttctgcagtgaagaaaaattcctgtgatagttcagttctttagtttttctatttgaaaagaaaaatcatttaaatgatcctttgttcacggctctccttaatgactgagtgaacagttcctatctgtatattgactaaaccttttcctaanctatctctcatggttcctatgtttttttatcataattaaaagcaaaaccatctggatcacctaacagtcagaggtcagtatctcagcgtgtgaattatngaggaaatacagagagaacctcttccacttttacttttcgtccaaataaaatgcatgg

SEQ ID NO: 268 - DNA, 719 bp, Homo sapiens
  misc_feature: Incyte ID No: 335202.1
  unsure 43: a, t, c, g, or other
cgtcgccaaggcaactcgagagctaagtccgggccctggcggngccggcgctgcgaatggactgatggccgctgaggctgctcctggcgcggttcatcatcggccgccgcactttcgcgactgagacgaaacgacactcacctttacttaatggaaggcttcgcttacatcctgaacttaaaggaactacagaaagggacagaaactgctttctttttaaacaatgcgctgaaaggttactagtgataggaggcttagtgaagcgcgtgatgtgaacggccacgctgcaaggctggagagaaaagaggagggagtgaagttgcaccctgatcgcgaatcctcggccttttatcaggggcgccgccactcggggtccgaccattcgcctccaacgaggggacagcgaatctgctgtcgtgtgcagtccacagcaaccacaggtggggcaacaggaggagcgcttgggcacgaccacgtgacccagcacgagccaccgcccgccccaaaatgaaatcaaatcctaatctcccaatcccggcatgccggtcactccagcctttccaggagacttgcggccgtgcagcccctacacctttatctggactcctgtcgtacttggcccagctccactggattcagcccttggataaccaccctaccagcccctaaagatgactccatccccgtcggtatagttaattaaagaaaaacaggagtcg

SEQ ID NO: 269 - DNA, 661 bp, Homo sapiens
  misc_feature: Incyte ID No: 978402.3
  unsure 651: a, t, c, g, or other
caaaaacaaaaaaacaccaaagcaacttgaatagtaaatggcaccagaagatggcagtctgctccataaccagagcaagtgcagtgggaaagctggactctcatacccactcacattcatgccttatataagcctctcctcctggttaaccttaacaggggagtgattcctctgctggttgctgtttttccttttctcttaccctattcctaacctctttgcttctctctttctttccttgtgtctcttccttctcttttcttttttttttaacatatagggtatttttttcttttaacatatagggtatttaccttcattttgtttatttccatttgtttccttcttcattcatgttcatctctgctattccttctccctccagaagggatggaaaccctattttcttttctccaagaccatggttggtctgcttccctcactcgggctccttgacagtcttctagaagagagaaggaggaaaagaagcagttcctgatgttacaaatgaacaaggatctcccaggtaaccagctccccacacccatttctgttactaatttctcaaacagaaatttctggttccccttcttccttatcactgagtgaaaggggacaggcatgcacatgtgcccatacatgcattcagantagagtgtgg

SEQ ID NO: 270 - DNA, 3036 bp, Homo sapiens
  misc_feature: Incyte ID No: 232146.1
aaaatgttttcaggaaacatgaacaaacatactgccaattatagtggggctgggaaggcacaggagctggcgacctctcagctgcatagttgggacggcaaaccctgctgtgagcttctcagacttttcacctacttcacctattaagaagccatgaggagttgtaaactcttgttcagggaagaaaagagggcaggaggaagtaacccaatgcctttaaatacaaaacagatgaaaaacaaaatactcatttttccttttctattgtgggtttggggagccaaaccaagtgtgactgtgagcacgttcactgagaggcatgacaacattattgaagaggtctttccattatgtctggttctcttattttcttaagtcaagccttaactatgaacatactttaagatgatacgggtctgtcaccataaacctgtaaaagggcatcgacagcttttcagataatccaggaatgttgagacatggctaagtttctagctgatacttagtcattccctcttgatattgttgggatgggtagccaaaagggcaggcttgtgggagttaagagccaatgatacctggaaacatgggaggtagctgggggtacaagtggatgttgagactgaaggaagaggtggaaagaagacacagaaggcacccagatgccaaaaggcctggcatgaatgagagttggcatctgtcctgttgtggtgttcccattcttgccatacccatttgcccagattgttctgattctcatgttcaattgactatcccacatgagactacagtttataggcagtgaggaattgtttcttcctgggaaatgtccttccagcaacttcagaggaatgggaaagtgttaatcttacgtgaagcaaaggagcctggactaggggcagagagaaagaagcagcagcccaccttctttgtgtttgcacatgtgcctatgtcgtgtacattggtacctgactgtggctcagatctgcgtcgcagcagcgagagaagaaatcactccatatccgatgagaggaagggtggcacagagatggtgtctacaattagagacatttctgactccaccttagcctaagcaaactttatatactgagtaacatttgaaggttgtcttttaatggtggggggtgttttttcctttttaaactacagtgcttgcacaagagagggagggactcagaaaaggttagggcaggtgagggagacagtagatggcctgggatgacttgagtccatcatactattgcttggcaggtgtcctcccccatgtttgattcaaattccatgagtgacctacctttccccaggaatgggactgagagggtagtctccagcaactcagtctgcacagggctccccgttcaggctgcctttggtggttgtgcttttgtaagtttctttctctgcacttcgacttacctctgaatcagaaagcaagcccagcaggtgaatgagggatgtctgcttggcattgcccaatctaaccagggaggctggctggccacccactgtccgctagaggggagagctagcaggtgttggtatgaactcaggaatagaaacacgaggcttttttaaatacgagggagaagaatccatgatgcatacctgtaaccccctagaacccaagtgccagaattcctagatgctgcttctgtttgaacaaaatgtcactgcttttacacttgaaaaaaacacactcgaaaaatgttcaactccatgaaaaatattttttggctttaagaaattgtttggtgtttaactgtttcctttgattgccattccaccagtaaattgttggttgatttgcactgcactctggggttggggttgggaggggagggtccttatacagagccgaacctggggttgctcaggaagtgggccagggaatgtggaagtcgttgacattgcctgggccaaaagagtgggagatagtttttctcccctcagcccactcctggtagcacctgtcgccagcctggtacaaagccaggcctttttcttctgtgagcatctcatcactgtccagcagcaggtggaaaaagggggacaacaaccagacctattttttctcccccattttttccaaattttgctgtgccaaatgtttaaaattttataaatatgaatctattgaaatttccttaatcaagagcttcttcgtgtaaagtttgcttttttagctatagaaaaagaaaacagtaaatatctcttaatggcatccagccttgctgagctcaccttttttcctgaagaatgggtaggagtgaaatatttaatgtaaacatttcaccaagtccctttaccctaattttgaagctgcattaaacccaactcactaacacagggaatgattgcaccctagtcctctgtgggccaagaaactttcagaagcattaaaaaaatagttgaagtatatcacttctcaccaagtgggtagagtcagttggctgtttgtcccttgttttttatttattccataattatgtttgtgctttttgttttgtaaacagtaatggaacgtacatttttattttgtttagaagacaactttgattcaatctttcaagaactgttccattcttggtttcttcttagggggataaaaagttaccagttaatttgttttgagatatttaagcattctttgagttatagaattgtgatgcagggatttgtgaatgagacatttacatgtgaaaggtgacttcactagttacctgcttgagcagagtaaagtgtgtatatgtacataaaatgtaagtaatcttaactccattgtgcagtgccttttagatgttccgctttctataaagtcttcaaatttttgcatatatattatatatatatgatgtaatgttatagaaatatatgtataatatacatattttttccaggggtatctgatagctctgtattttgttatggaagttgaaagaaaaaagtattttacctcagaaattaaataaaaaaatacttttaagtataaaaaaaaaaaatagcgccgctcgtgat

SEQ ID NO: 271 - DNA, 371 bp, Homo sapiens
  misc_feature: Incyte ID No: 025757.1
cgagacttctctgtttccgagcgctgtgaaggaactgagtgaattgaggctttgagttttcgttagccaagacgttgtgttgctctgtgttctttttggccgggagtggttatgtccgtgtcctactgttaggtcttttaggctgaagaatgcgttccttcccgctttggcaccagcgtcactggcaccgtttttgtcctgtgcttactgaccattctgcatcttttgtgaagtttcagttccagtcttctgcccgtttttaaatctggtccttcgtgtttaacagttctggatacaaatgttttgttagatatatgtatgctctgaatgaaaatcttttgttacataaatgattgcgaagtctttttccc

SEQ ID NO: 272 - DNA, 199 bp, Homo sapiens
  misc_feature: Incyte ID No: 206860.2
tgatcttttacaaagactttaataacaaggcaacttgtggtacaatattaaatgaaaaaaatgtaggtatatttgactacataaaagtgagaggggaaagtctagaatatgctaaaatccttaagtatttgagtgactttcctccccttttcctaattttctgtatatcttaacatgttaaaacaataaatgacttatt

SEQ ID NO: 273 - DNA, 1028 bp, Homo sapiens
  misc_feature: Incyte ID No: 239797.3
catttgaggccatataaagtcacctgaggccctctccaccacagcccaccagtgaccatgaaggctgtgctgcttgccctgttgatggcaggcttggccctgcagccaggcactgccctgctgtgctactcctgcaaagcccaggtgagcaacgaggactgcctgcaggtggagaactgcacccagctgggggagcagtgctggaccgcgcgcatccgcgcagttggcctcctgaccgtcatcagcaaaggctgcagcttgaactgcgtggatgactcacaggactactacgtgggcaagaagaacatcacgtgctgtgacaccgacttgtgcaacgccagcggggcccatgccctgcagccggctgccgccatccttgcgctgctccctgcactcggcctgctgctctggggacccggccagctataggctctggggggcccccgctgcagcccacactgggtgtggtgccccaggcctctgtgccactcctcacagacctggcccagtgggagcctgtcctggttcctgaggcacatcctaacgcaagtctgaccatgtatgtctgcacccctgtcccccaccctgaccctcccatggccctctccaggactcccacccggcagatcagctctagtgacacagatccgcctgcagatggcccctccaaccctctctgctgctgtttccatggcccagcattctccacccttaaccctgtgctcaggcacctcttcccccaggaagccttccctgcccaccccatctatgacttgagccaggtctggtccgtggtgtcccccgcacccagcaggggacaggcactcaggagggcccagtaaaggctgagatgaagtggactgagtagaactggaggacaagagtcgacgtgagttcctgggagtctccagagatggggcctggaggcctggaggaaggggccaggcctcacattcgtggggctccctgaatggcagcctgagcacagcgtaggcccttaataaacacctgttggataagccaaaaaa

SEQ ID NO: 274 - DNA, 3957 bp, Homo sapiens
  misc_feature: Incyte ID No: 441328.12
  unsure 735-759, 1985-1986, 2715, 2718, 2729, 3563, 3565, 3567: a, t, c, g, or other
caaggttccgggattatatgtaattgactcaattgtgcgacagtctcgtcatcagtttggaactgataaagatgtttttgggccaagattctctaaaaacataactgccacattccaatatttatatctttgtccatctgaagataagagtaaaatagttcgtgtgctgaacctttggcaaaaaaatggagtgttcaaaattgaaattattcaacctcttttggacatggcagcgggaaccagtaatgcagccccagtagcagaaaatgttaccaataatgaaggctcacctccacctccagtaaaagtttcttctgaacctcccacacaagccactccaaactccgtcccagctgtaccacagttgcccagctctgatgcttttgctgctgtggctcagctgtttcagacaactcaaggccaacagcttcagcagatccttcagacttttcaacagcctccaaaaccacagtctcctgcccttgacaatgctgtgatggctcaggttcaggctatcacagctcagttaaagacaactcctacacaaccatctgaacaaaaagctgctttccccccacctgaacagaaaactgcatttgacaagaagttgcttgatagatttgactatgatgatgagccagaagctgtggaagaatcaaagaaagaggataccactgccgtcaccacgacagcacctgctgccgcagtaccccctgcacccaccgccaccgtgcnnnnnnnnnnnnnnnnnnnnnnnnnctctcctcctcctccacaggcaccatttggctttcctggagatggcatgcagcagccagcatacacacagcatcaaaatatggatcagtttcagccacgaatgatgggaatacaacaggatccaatgcaccatcaggttccacttcctcctaatggacaaatgccaggatttggacttcttcctacacctccatttcctcccatggctcagcctgtgattcctccaactccaccagtgcagcagcctttccaagcttcttttcaggcacaaaatgaaccacttacacagaagccgcatcagcaggaaatggaagtagaacaaccttgtattcaagaggttaagcgacatatgtctgataacagaaagtcaagatctaggtcagcatccaggtcaccaaaaaggaggcgatctagatctggttctagatctcgaaggtctcggcatcgacgttctcgatctcggtccagggatagacgccgacattctccccgatctcgatctcaagaaagacgggatcgagaaaaagagagagaacgtcgacaaaaaggcctccctcaagtgaaaccggaaactgcaagtgtttgcagtactaccctctgggtggggcagctggacaaaagaactactcagcaggatgttgccagtctcttggaagagtttggtccaattgaatcaatttaatatgattccccccaggggttgtgcctatattgttatggtttataggcaagatgcatatcgtgccgtgcagaaactgagccgaggaaactataaagtgaaccagaaatccataaagattgcgtgggccttaaacaaaggaataaaggcagattataagcagtattgggatgttgaactttgtgttatttatattccatgtgacaatgttaagcctgaggaaatggagagtttttatgaaggaggaatgttggacagtgacacacttaacccagattggaaaggaattcctaagaagcctgaaaatgaagttgctcaaaatggaggtgctgaaacctcacacacagaaccagtatcacccatacctaaaccattacctgtgcctgtccctcctattcctgttcctgcacctataacagtgccacctccacaggtcccaccacatcaaccgggtccacctgtagttggtgctctccagccgcctgctttcacgcctcctctgggaataccgcctccaggctttggtcctggtgttcctcctcccccnnctcctccaccatttttgcgcccaggattcaacccaatgcatttaccaccaggttttctgcctcctggacccccacctcctataactccaccagtatccattcctcctcctcacactccaccaataagcatcccaaactctactatcgctggtataaatgaagacactacaaaagacttatctattggaaatcccattccaacagtggtgtctggggctagaggaaacgccgagtctggtgacagcgtgaaaatgtatggctctgccgtgccacctgctgcacccacgaatctgcccacccctcctgtaacccagcctgtttcacttcttggcactcaaggagttgcccctggtcctgtaattggacttcaggcaccatctactggtcttcttggcgcccggcccggtctcatcccactccagcgccctccaggaatgcccccacctcacttacagcggttccctttgatgccgccccgtcccatgccaccgcacatgatgcacagaggcccaccgccaggaccagggggctttgcgatgcctccacctcatggaatgaaaggtcccttcccaccgcatggcccctttgttaggcctggtggaatgccagggctcgggggcccagggccaggcccagggggtcctgaagacagagacggaaggcaacagccgccgcagcagccacagcagcagccacagccgcaggcgccccagcaaccacagcatgcangcngcatgcagctngcccaccaccatcacaacagcctccaccaacacagcagcagccacagcagtttagaaatgataacaggcagcagttcaattcaggtagagaccaagaaaggtttggaagaagatcttttggaaatagggtggaaaatgaccgggaacggtatgggaaccgtaatgatgatagagataatagtaaccgtgacaggagagagtggggaaggaggagccctgaccgggacaggcacagagacttggaagagagaaatagacgctctagtgggcatcgagacagagagagagattctagagatagagagtctcgtagagagaaggaagaagcccgaggaaaggaaaagcctgaggtgacagacagggcaggtggtaacaaaaccgttgaacctcccattagccaagtgggaaatgtagacactgcttcagaacttgagaagggggtgtctgaggctgcagtcctaaagccttctgaagagttacctgctgaggctacctcatccgttgaacccgaaaaggattctggctcagcagcagaggctcctcgttagagactggaatttgtgaaaatgtgacagtgacacttcctggagtgtagagcttgaggtgtacagatgctgtattatatccgctcccgctgtactgcagccccgcgccagctggtggggaactgtaagcaatttgattgcttcccttctatttaaaaatagccacaaaataacaaaaaatactgaaaatatgaataaatattaccctttttgctgtaactttttaaaagttttgactttaaaaagtttacaaatcgtaattagaagtgctctctattttttttttttntntnaatttaagacaaggtaacggtgaaagctcctcaaaacaatagggatgtttttaataaactctattttcgtaacaaactttaatgtgtgctattcttcctacactgcattaaggtggaaagggattgttcaccgtcaaagtttgagctgttaatactgtattggagtctaaattagacttatttgatgaaaatagacattttatgtagttattctcactttcatatgtaatacttttgatttttagtgctcagtcataaggtaaaggttagttgttttaatgtcaattgaaaagctgtgtttgcaattcaatcgaggttttctttttttttccattggctttgtggtatatgttgccctaatttgtaaggagattttgctgggtgaaaagt

SEQ ID NO: 275 - DNA, 507 bp, Homo sapiens
  misc_feature: Incyte ID No: 113975.1
gacaaattgttgatttttaaatagaatgccatgtactctttgctaagaaaatttgcctttaatttttagacctttgagtattttattactagtttttttctgtctctgattcagtattattatatcttcaaaatactgaatatctagggagtctgattgataaacctcaatttccagagagtcaggtagtatttctttgcccatataatgttggatcttaatatataaatcttgcattcagccaaaccatattaagcttggcaaaatcctttgtttctacattatgtctgaataatgatatactgacaattagaatcttcatttatttctagttcagaatggcttcagatgttgttgaactttgtgttgtacttatctcttgaatgaaatgaggtaggccggagtgggtacaggatgtaaagtcagaggcctggataataatctggctcttccaaactcacttaaccacgttgagacactttcatgtctgtacaaacgagccaaaaa

SEQ ID NO: 276 - DNA, 936 bp, Homo sapiens
  misc_feature: Incyte ID No: 427554.6
cctgctggacacacagagaatagcactgtttgccgttcatccaccagctgcagctccgatggcaacctgcgtccggaagccatcactgctatcatcgtggtcttctccctcttggctgccttgctcctggctgtggggctggcactgttggtgcggaagcttcgggagaagcggcagacggagggcacctaccggcccagtagcgaggagcaggtgggtgcccgcgtgccaccgacccccaacctcaagttgccgccggaagagcggctcatctgaacgctggggcctgctgcagccaccaacactgcccaggactgcgggttgctggcttgtacaccgcagctgccaccgagacaccagcctctgatggctcaggaggacttgtggggagaggctgggggcacccatgtggtgggctctgtgcagcatgttgcctctgcttggctgtgcctgcagctcagggtgctggggctcgggacccacccccctgcttgcggaaccaacttttctctgtgtgtccagcaggccccacaaccccctctcctttctttcagttctcccatgcagccgaggcccgggcccctcaggactccaaggagacggtgcagggctgcctgcccatctaggtcccctctcctgcatctgtctcccttcattgctgtgtgacttggggaaaggcagtgccctctctgggcagtcagatccacccagtgcttaatagcagggaagaaggtacttcaaagactctgcccctgaggtcaagagaggatggggctattcacttttatatatttatataaaattagtagtgagatgtaacaaaagctttattggtgtgtttgagctggtgggtgccacatatttggggatttgaagaaggaggtgagatgtctggatggggactgggatgggtagaggattcagtgatactccgag

SEQ ID NO: 277 - DNA, 1787 bp, Homo sapiens
  misc_feature: Incyte ID No: 360130.31c
ctgaaaatcacaaaggaggaaggccaagtgccttagcaatctcaataaaaatatgaagttctttttacatggtaaatttcataatataaaaagtttaatgtctggaaatggtgtaatttacaaaaaaagtccacgtaggccaaagatggctaacactgcatataaggaacgtgaatgccagtgggaaggtgtctgaggaggggcagggccacaggtgtcctgacagggaacatctttgaaggatctggcacaaacaagggcccagttcacaaaccacaggtacactcattttagatagaacagcagaataggtgatgaaaattatacagttttcacttgttgcctacttactgaaagcaaaccagattattgcatggcatttttccagcctgaactgaaattatcaaggctacagttcttcttgtgggtctgcaaatgtgtgtggctgggaggtggcagaatcggcacgggccagggaccggctgcagtgatcatatgctggagcgtcactgggacagagagagcaggatgaggacagcgtgggtgacacctttgtctcctgctaaaacccagcaagtttcagtgtggaccgtgaatttttaaaaaatggaatggaggtgaaaactttcattttgtgttgcacatcagtgtggatcaaaatgtaagttttagtagcaatttttctcttgatattttgacttaattaaaaaaatcaaattagttgagtcatttactggagagaattaagaaagctttgactcccttgctctgtggtcctgctgaggtttctaagagaggggagttgtacggcttatagtcattgtatttacatctgatggagtagcagagggtggggcatgccagtttcctgagctaaaaggaaatatatgcaatgctttctgcaaatggtaaggaaaaaattgttttgtaaatattacatccatggacacctcccgaagtggaccacaagaaacgcaaaatccgggaggagattgagcattttggaatcaagatctatcaattcccagactgtgactctgatgaggatgaggacttcaaattgcaggaccaagccctaaaggaaagcatcccatttgcagtaattggcagcaacactgtagtagaggccagagggcggcgagttcggggtcgactctacccctggggcatcgtggaagtggaaaacccagggcactgcgactttgtgaagctgaggacaatgctggtacgtacccacatgcaggacctgaaggatgtgacgcgggagacacattatgagaactaccgggcacagtgcatccagagcatgacccgcctggtggtgaaggaacggaatcgcaagtatgaccagaagccaggacaaagctggcagggggagatcccaagcctagccttgggtgagaccaagccctacttttgttcttctataggccctgggctcaatctaagcgggtgctggggtcctcctcgccttatcaaccctttctccctttagcaaactgactcgggaaagtggtaccgacttccccatccctgctgtcccaccagggacagatccagaaactgagaagcttatccgagagaaagatgaggagctgcggcggatgcaggagatgctacacaaaatacaaaaacagatgaaggagaactattaactggctttcagccctggatatttaaatctcctcctcttcttcctgtccatgccggcccctcccagcaccagctctgctcaggccccttcagctactgccacttcgccttacatccctgctgactgcccagag

SEQ ID NO: 278 - DNA, 365 bp, Homo sapiens
  misc_feature: Incyte ID No: 082154.23
agctgaagcctgcccctccctttccccagcgctgccgtcaacgccgtggcctggtgctactccaggagccacatggtgagcgtggaccagggcaggaaggttgtgctctggcagtagggccacgacctgcctgcctgggctggagctcttgcccgaagcctgaagcttccttcggcgccatgcaggggttggggttgggactggagctggccttgggatttaatggggaagaaggcctggcaggacctggcctgtttgtttaaaaatgaagtatgggttgggggattacgctagtttttctttgtatttttatctctatctatctcctcactttttctcccaaagtagaaaaaaatgatatctga

SEQ ID NO: 279 - DNA, 2608 bp, Homo sapiens
  misc_feature: Incyte ID No: 082154.24
ggctcgtgcagcgcaaggcgcgcgccgcggccgagcgcaacctgcgcaacgagcgccgggagcggcgcgggtgtcccaggagctgaagaaggtggcaagcgggacccgtgagcatcagcgagtaagagtggggatgggccggtccgacccttgcgttctgcctcccgccccgcctgcctgcggcgacccaggctgccgactgtacttgtgcacagccccgtcctgaggcccccatgtggtcggggcccacgagacacctgcagaggaccgtgtggtcgtaggagcctgcatgcgtgaccgctgcacgtgtacacccacacagaaccctcatcactgggaattcctgtcttcagcgtatcctgtgctggggtcgggaggggctggcttggtcccttggcctttctgaacttcattacctctcctaggggcccggacaccctaggcgatgggatgagggagagaagggagactctggctctggcccctgagccagagcccctggagaaggaagcttgtgagaagtggaagaggcccttcaggtgaggacccaggtgacagtctcagagctctgagctgagccccaccccagaggctgccagggtcttcctcttggaccttggagccagctcttgggttgggagggggcttgaggagaggccagaaagctcagatctcccagggctagtctgacctccattgtctggagccacttggggtcagttccatctcacccccccaacccctaccctcaaccctttccctccttcttgggatcagagctctgggggtggggagtcaggcttctgaatagctgtcaccaggagagaacctgtgggcaaagcccagagcccagtcatgccaggcatgtgtgcgcagccataggtgtgcaagcatgtgcatccgcagggacatgaggccacaggtgtgtacaagcttgactgagcccgtctgtatgtgtgaatatataagcatgtgtagatgtgtgctcacacttgtgggacctgattggggcttcagaccttgggtgcctgtccgcagggtctcctccatccttcttgatttgcctgtcattgaggctgcccgctctgggcgccattccccagcctaacacctcttctcagtctttccttgcaggtccctggtgtccaggccttggggcagtgaagaaaccgtggggaggggcatgagatgccagtccccaaagtccttgggagcccttgtgggccaagtcattgtaggacacaccctctcctgggcattgctgaggtcacccagtgagcctaggctcccccctcctcccatccccagcctgggggaaccttcagcgtctctcctccctgtaggccccggctcagcttcccaggaacttttgttggtctgcctcagccacctccctgacgctgtcccactgtgtggatgtggtgaaggggcttctggattttaagaagaggagaggtcactcaattgggggagcccctgagcagcgataccagatcatccctgtgtgtgtggctgcccgacttcctacccgggctcaggatgtgctgcagcctcctggccactggaggggctgaccgcctgatccacctctggaatgttgtgggaagtcgcctggaggccaaccagaccctggagggagctggtggcagcatcaccagtgtggactttgacccctcgggctaccaggttttagcagcaacttacaaccaggctgcccagctctggaaggtgggggaggcacagtccaaggagacactgtctggacacaaggataaggtgacagctgccaaattcaagctaacgaggcaccaggcagtgactgggagccgcgaccggacagtgaaggagtgggacctcggccgtgcctattgctccaggaccatcaatgtcctttcctactgtaatgacgtggtgtgtggggaccatatcatcattagtggccacaatgaccagaagatccggttctgggacagcagggggccccactgcacccaggtcatccctgtgcagggccgggtcacctccctgagcctcagccacgaccaactgcacctgctcagctgttcccgagacaacacactcaaggtcatcgacctgcgtgtcagcaacatccgccaggtgttcagggccgatggcttcaagtgtggttctgactggaccaaagctgtgttcagcccggacagaagctatgcactggcaggctcctgtgatggggccctttacatctgggatgtggacaccgggaaactggagagcagactacagggaccccattgcgctgccgtcaacgccgtggcctggtgctactccgggagccacatggtgagcgtggaccagggcaggaaggttgtgctctggcagtagggccacgacctgcctgcctgggctggagctcttgcccgaagcctgaagcttccttcggcgccatgcaggggttggggttgggactggagctggccttgggatttaatggggaagaaggcctggcaggacctggcctgtttgtttaaaaatgaagtatgggttgggggattacgctagtttttctttgtatttttatctctatctcctcactttttctcccaaagtagaaaaaaatgatatctga

SEQ ID NO: 280 - DNA, 2573 bp, Homo sapiens
  misc_feature: Incyte ID No: 1137293.16
  unsure 1765, 2554: a, t, c, g, or other
tttcctcccagaggatgactcttagtgtaagcacatccctctttgagaatctgactgtttctgggaatcaaaaatgtgggtttatatttccgatacttctggagtgccaggttgtttgcttttgttttcaacaaaatgtttggccctagaaatgcagcaacttgctctgttgccaggagcttccctgccaagtgtcttgtgcacagccctctcctgggtgagctcctggacaaagcctcatgccctggtaaaccctgcagactgcagccactattctggcctaggtcatagtcttgagcaccagctctgctagggctactcaggcattgcacttgtctgcaggtgttaggaatttatgttactgaagagtgagcaatgtcattgtgagagcatgtgcaagagcaagctttcctgcaatacctaaagaaaagcaaggggaatagtaggacctgggacagcagtcctaggcccattaattccccttgcccctctgacagaatttcgaactcagtattcttcgaatactcagatgccagggttgccattgtaacagaataacagtggctgggggacacccattcagtggctcttcagaaagaacaaattcactgggtggatataacacttaaggaaaatgctcaataagccacccattgagtctcagagcaacctgaccaacaaggtgaaaaccatttaaaagacacattgtcttgctggagaaccttcctcccctgggtttcaccatggaacttcagcattacatgactaatgggcacgtaaattaaatgttactaagcaagagactattctcacttcttgccaccctgagcagggcagggaagccagccagcagtcacagtgatggggacagccttaaaggcccatagtcacttggaagacaatggcagagcccttaggggtttgcccaagccaggtaggatgttagcaccagcctagtgctcaaggatgaggacagtcacatccaccagcccccaaccctcagcaatgagtactcattctaggtcctgatagctgccttactttggcccccagatcacaagtccctttaaaggaaagctgatctcctcgtccactgtggcttgtgcttccttttgtcccaggtgccacccacgggctctgaacattcatcctagtttgcttgctcccgcatcccgagcagcatttgagtcttatgtttgaaatgggttcatttgagccagcaactccctgcttcccttttgtgcctcgtgcacttggagtgtccactgtcctttacctgtatcccaaggctccttctctgagacttcccagctctcctgttatttcccacctcatgcttttctttgcagctgaaccttattcacagtgaaatcagtaatttagccggctttgaggtggaggccataatcaatcctaccaatgctgacattgaccttaaagatgacctaggtaattggggacggggttcggcaccaccagctgtcagatgaaaagttatggaacccagaatttaggcatttcatcttcccagactttacagtggtcaagccaaatttccaaatccaagattgatatttgagtgtagacgctgaatatcaacttactccaggccattccaagtgtaaacggtctgtttcattaagtgtgattggctactctctcctcaattgcaaatacattgccatctgaattctcttccataatgatcaaactgactgctggttacttggggagggatttttaaacgtgttggttcacgtctgtntttttgtttttactttagaactgaaaaatctcaggtaactacaaaatgatagtttctccatttaaaccttaattagaaatgacaaagcttgaaagagaagacaggccacatcagtatgctattaagctgtctttagtccacaatttactaccatcacttcaacttttctttagaactgaaaacagtatatgactgaatgccaccttcttgaattatttggctagaggatggtattaaacagaagggcaatatctccaagtgagttcttatggaggaaaactgccccagagccatggtgtctccctgttcaagatggcagatggttcagggcagactgagaggtgcccctcaagtgtcctgcctctatggctttatctttgcatatgtggcactgtcagctcaatggcacgacagggctgctctgctgctcttcgatgtagaggcttgccaggggaaataggcacacagatgcagcctccttcctaaccctcaactgcaatctattttgtatcccttgagctctcagcttctgctgtttttgtcagatagcagacttccttactgggagatacactcattccatgggcccaggcctgacccacacgaactgggtgcaacagtgggctgaaaacatgaggactggactcaagagtgtccagcttgaacttgttttccaactgccttatacagatacttaaaaaaaaaaaggccacaagctagaaaaagcaaggattctatccaaagcacattttatactaaaatacaaaggccaggtgcagtggctcacanctgtaacttcagcgttttg

SEQ ID NO: 281 - DNA, 919 bp, Homo sapiens
  misc_feature: Incyte ID No: 994468.3
ctatgtttttagaatcaaagatgaaccggtaagctgtctcatgtaccaaacgtgaaatttacagtgtttacaaatgtctggaattttgcactgccatagggaatgttaaggttacttggctggaatttatcagacttgtgagtaaacaagttgaagtttagcagatgagggggaatattgaggcccctaaggctaaacaaaataatcagtatctgagatagtggctaatgtggctccccaggcctaatttgggaacagtttttcctgattgctttgagaagtactttcttttgacagaaattttcattctgcttgccattgctatattctccctttataggagccattggatttctttccttttgtgggaaatgtcccattagcattttcagatcttttgatgtgcactaatgccattattggtaatgccgttattggtgaatacagcatagttaaataaactgttacagtaaatctacacttggatttgctgcacctctaccaatagccttttgaatgactgaaagtgttaacagagaaagaggcatgtctgcagaaagagatagctaatattttttggtactttatctgaaatccaagatgctgcttcccctgcaggttgttttccttcttacgatcctcattgaatcccctctgggagcacaggacagttagtagaactctccatttctttgttttgttttttaagacagagactctgtctcaaaaaaaaggacatttatcattataacatcttattagagcccctaatttcttatctgaaggcactgtttttttttttaaacagttaagtactgatgtcaacagacaaatatttctgatcagatagtcccctgtcaacagtagcaaatgtggtttcataaagtgggaagaaaacagcattttaaagtaacttttt

SEQ ID NO: 282 - DNA, 769 bp, Homo sapiens
  misc_feature: Incyte ID No: 994532.1
gctgaatctaaagtatctccttattaagagctagatattaaataaatacaagtctcctagagcataggaaaatcatgtttcttcctatcaaagatgttgaaatctttacaaaaacactgatcaaaattggtagattttgagggggttgtacctaaaaagtgaaagagactgtctttatcatatccttggtcctagagaaatcattgcaactcatcagtagtggcatctctgagaatcacatccatattatttaagcagcatctgtcaggcccaaagctcacaacctccttttgggcattaaatttggcatcaaggctgggattacaggcgtgagcaactgctcctggcccaaaacatctctttctacatacacttgagtaggtggcataaaatgcactgtcaatatatagaaaacatgaaattttccaaatatttccgatcagagaatcacaagagcagcaaatgtggtttcatcaagtgggaagaaagcagcaatttaaaataactttttgggagactgaattgagtaataataaaacttcagtctttcgctaatataatataatcatatatataacaattattgaatgtggccagctcactagatgaggaaagaggaaggcattttctgcattcttgcctagttttccttataagcaccactaagttaatagctctgtctttttggtgtttgcactatgtaatgcttttaatactttttaattgtgcttttttatgtattaaatgtttttccttttgccaaaaaaaa

SEQ ID NO: 283 - DNA, 536 bp, Homo sapiens
  misc_feature: Incyte ID No: 090710.1
ggaaagatgggcattacacccgtgctctaagtctgatcccatgtatagcatgaaaagaagaaagaatattcatgcatgtacaatctgtggcaagatgtttccatcacagtcaaaacttgataggcatgtacttattcatactggtcagaggccttttaaatgtgtcttgtgtactaaatcttttcgacagtcaactcacttaaaaatccaccaacttacacattcagaagaaagaccttttcaatgttgtttttgtcaaaaaggatttaagattcaaagcaaacttctgaagcataaacaaatccatactaggaataaggcttttcgggctcttttattaaagaagaggcgtacagaatctcgccccctgcctaataagttaaatgcaaatcagggtggttttgaaaatggtgagattggtgaatctgaggagaataatccacttgatgtccactcaatttatattgtcccttttcaatgtccaaagtgtgaaaagtgttttgaatcagagcagattctcaatgaacacagctgtt

SEQ ID NO: 284 - DNA, 587 bp, Homo sapiens
  misc_feature: Incyte ID No: 304359.1c
cttacacattcagaagaaagaccttttcaatgttgtttttgtcaaaaaggatttaagattcaaagcaaacttctgaagcataaacaaatccatactaggaataaggcttttcgggctcttttattaaagaagaggcgtacagaatctcgccccctgcctaataagttaaatgcaaatcagggtggttttgaaaatggtgagattggtgaatctgaggagaataatccacttgatgtccactcaatttatattgtcccttttcaatgtccaaagtgtgaaaagtgttttgaatcagagcagattctcaatgaacacagctgttttgctgctagaagtggcaaaattccaagcaggttcaaaagaagctacaactataaaaccattgttaaaaaaatcttggccaagcttaagcgtgctaggagtaaaaaattagataactttcaatctgagaaaaaagtatttaaaaagagtttcttgagaaattgtgatcttatttctggtgagcagagctctgaacaaacccagagaacatttgtgggttctcttggcaaacatggaacatataaaacaattggcaatagaaagaa

SEQ ID NO: 285 - DNA, 109 bp, Homo sapiens
  misc_feature: Incyte ID No: 012402.1
tgcctttagtttctgaggcagtaggatgataaaaatgtctgcccttcaggataggatacttattttagcagaaataaatttggttaactgtggtttaaaattgtctttt

SEQ ID NO: 286 - DNA, 586 bp, Homo sapiens
  misc_feature: Incyte ID No: 092743.1
atcatggtttgtccaaatattgagttgaaatctgtttcattttgctcacttggctgtttagagcataagaaaataagattctttgacatgtttggaaacagtgtttctgccctcccaataatgcccaccacacccactttttttccctttaagctgaacatctttcacaggagagggatctgagacttctctctagcctgatcaccctctactggacatactctaacttgcaatgtcctttacagctcccaccacaaaagcagagattcagaaaagtagggtttggtttctgctccgaggaaagaccactgtggacgtgacagtctctcctcccccaggccctccgtttctgtgcctacttctccttatgtgatgacatggaataatatgtgatgacatggagccagtgcctacagcaggtggtggcctcagataggcagagaaaggaagggtccagaggtttctgattttgccaagtgctccgtgctcattggtccctgggcatctgcaggagaatggaatatgtttcccttggaggaaaggcatgcattgctgagcatttggaggaaggaattagaaagggggc

SEQ ID NO: 287 - DNA, 836 bp, Homo sapiens
  misc_feature: Incyte ID No: 018513.1
  unsure 793: a, t, c, g, or other
gttgttacggtatgttttagatatatttaatcaagcacatagtctgtaatgcacctatagatagatgtttattatgataatgatacagtttttgctaattttatacattggtttttagaagtctcttatactgaataaatttacattttacatagtctatattactcacattatttttaaagacttattttttacattaactgtttagtaaacagaataggtgtggaataaattctgtagtgtttctacttcgattacataaagaaacatgataacttttaccttctattacccatctgtttttacaacattcaaattataactatatattcagatattatttcagggcattaataggaaaaaaacaaaattgtccgacccaaacagaatctctcttctgttaaattaggggatccatagctatgctctttcttacagtaataaaatggtgaaaatattctaaactaaaaatatcctctaattattatttctgtgactctgaaaatatttcatgaaaaaaatcccacttcaattgaatttttctgctttgatgcagatagtcttttgctaatttcttatttctatatgtaaggaattgctaaaactcttggtggctttaaacccttatttattctatctaaagcaaaatttatgtctagtacacaaatcttcatgaaactttaatccacattattagtatcatttagttactctccagaattaatcttggaagctgaattcttttaacgaccaaagatgttccacaaagactatttgaaagaacaccctcatnaaacatttctagttcactttttaaatcacatggttttgaaaag

SEQ ID NO: 288 - DNA, 1538 bp, Homo sapiens
  misc_feature: Incyte ID No: 477387.7
cctgggcgaggtggtgggcgactgcgtcctggagcgcgtcaagcagctgcactgcaccggggccctgcgggacggccagctggcggggccgcgcgccggcgtctccaagcgacacctgcggggcgaccagatcacgtggatcgggggcaacgaggagggctgcgaggccatcagcttcctcctgtccctcatcgacaggctggtcctctactgcgggagccggctgggcaaatactacgtcaaggagaggtctaaggcaatggtggcttgctatccgggaaatggaacaggttatgttcgccacgtggacaaccccaacggtgatggtcgctgcatcacctgcatctactatctgaacaagaattgggatgccaagctacatggtgggatcctgcggatatttccagaggggaaatcattcatagcagatgtggagcccatttttgacagactcctgttcttctggtcagatcgtaggaacccacacgaagtgcagccctcttacgcaaccagatatgctatgactgtctggtactttgatgctgaagaaagggcagaagccaaaaagaaattcaggaatttaactaggaaaactgaatctgccctcactgaagactgaccgtgctctgaaatctgctggccttgttcattttagtaacggttcctgaattctcttaaattctttgagatccaaagatggcctcttcagtgacaacaatctccctgctacttcttgcatccttcacatccctgtcttgtgtgtggtacttcatgttttcttgccaagactgtgttgatcttcagatactctctttgccagatgaagttatttgctaactccagaaattcctgcagacatcctactcggccagcggtttacctgatagattcggtaatactatcaagagaagagcctaggagcacagcgagggaatgaaccttacttgcactttatgtatacttcctgatttgaaaggaggaggtttgaaaagaaaaaaatggaggtggtagatgccacagagaggcatcacggaagccttaacagcaggaaacagagaaatttgtgtcatctgaacaatttccagatgttcttaatccagggctgttggggtttctggagaattatcacaacctaatgacattaatacctctagaaagggctgctgtcatagtgaacaatttataagtgtcccatggggcagacactccttttttcccagtcctgcaacctggattttctgcctcagctccattttgctgaaaataatgactttctgaataaagatggcaacacaattttttctccattttcagttcttacctgggaacctaattccccagaagctaaaaaactagacattagttgttttggttgctttgttggaatggaatttaaatttaaatgaaaggaaaaatatatccctggtagttttgtgttaaccactgataactgtggaaagagctaggtctactgatatacaataaacatgtgtgcatcttgaacaatttgagaggggaggtggagttggaaatgtggg

SEQ ID NO: 289 - DNA, 5355 bp, Homo sapiens
  misc_feature: Incyte ID No: 350440.14c
ggttcttttgggcccaaagggaaaaggatctaaggttaccccagtcatccctatcccttcccatttcttaatcctcatttaaaaaaaaaaaaggaaaggaagggaagacaaaagacaaagaactttggagaggtttgaatgaaagggcagaaagagttagaggcctacaggcctttaggtgtaagttttcaaagtgggaaaaattgaaaaacaatcacactactggcggattttatacattccatctctaccgcaacatatttcacttggggatatttgtctccctctgaaccctcaacttagcttataaatggcacagacttgtaggacaaaatccagaattcaggagaggaacatcggggagaatgtggggtggggtgatgccaagaggattgtcatcatttctttaaaaatgacaagtgactaccaaggagtagattctaccatgacctgaatggggtttgactgggtcccgctacaaaccccaagtcaagcttaagttgaaatccttgtaagtctgtgctcttgcctcttcatggtcaggtagaggttcacttcacacacactgctgttaacacagcagctgacgtgacgatgaaaagtcccatcatcacctcatagatgggacagacgaaaatggaaataggtaaaatagggatgagagtcagagaaagaaaattcaaactgatgtctctaggctctgtagagagctgtccgactgggggagctgcacttggttgcaatccaccgcattgttgtttgtattggcatatggagtgacctcaccatccaacaggagcaccctagtcccaaacttagaagccttgtcaggattttcctcctcttcctcatccaggagtggtgttcgtggcaactcctcctctatggcgaattcagggtgggtcatgaagctgtggatggacttttggttgtagggtttctgaatgctttcgtggagggaactatggaacgctttgaccactttgattgcccataggaggagatgaaacagcaggaacagaagtggtgggggaagatttgactggtgcaactgctacataggatgaactaggaacaagttttacatcaaggtgttgacccatgttctgtcgccttaggactcccttaaaagaggctcccgtctggaatgtgttaattacgtcgatctgagtctggatacggttcaggccccggaaccagaggatctggcctcggcgcagctccatctcagcatggtcaatctcatccagtccctcggcatccttggtgatctcctctttggtggtgccatgcccagcctccttcaggaacttcagggatcgggtaggtattgcggagatgaactggccccacagaagttctccaatcccaatgaagagacaccacagccactgagacaggctgaggcttgtacaactgaagggtttacccccaaattccacgatgaaaatctggcagatgaatgtgcccaagactacagagcagaagataatgttgcggtagatgcctgaaaagacgttcttctctccatggatctttcgggagttgatttcattgaagagctgcatcagcacgaaggtgttaaaaacaatggtatagtgctggctgggtggtgaatgtagaggtgccttcctcccactatcaatatcaaagaatttctcacccgcaaagacaaggataaagatgacaatgagctgatagaatgcatggcccaagatgttcttcatcatagtgcgtgagatcagaggcttatttcggccataggggcgccgcttcaacagagattccgtagggggctctgtggccagggccaatgaagcaaaagtgtccatgatcagattaacccacaacatctgcacagctttcaatggggaatcctgagtgatacaggctccagtgaaggctacaatcacggccaccacattgacagtgagctggaactgcaggaacttggagatgctgtcatagacatttcgtccccacatcactgccttcacaatgctggtgaagttgtcatctgttaggatgatgtctgaagcctcctttgctacatctgtgcctgcgatgcccatggcaaaaccaacatccgctttcttcagagcaggcccgtcatttgtgccatcaccagtgacagccacgacctgccggtgttccccaacagtgctgtcaattatgcctttcaccagggtgtgcttgtcagtgggagaagatcgcgccaggacccgaagcttaggccagatcttgtccagcttttcttgctctacctcgcctttctcgttgcggatgagccggttgaattctttgccttctaagcacaggaagtcatccccaggtgtcagaatgccacatttggtggcaatggcccgggctgtgttgatgttgtcacctgtcaccattctgacagtaatgccagcttgtttgcatttggcaatagcatctggcacctctgggcgcacagggtcctcaatgcccaccaccgcgatacaggtcagttcggtgaggatctcattctcattgtcccaagagggctctgtgtcatcgaagtcccggtaagctatgcagatagtccggagtccatcacaggccatgggctcgatgacagtgcgtaccatatcatctctgtctttattcttgaatggcactgcttcccctttccggtccaggattcgattacacttgcgcaagatgatctcagaggcgcccttgctgtacatacggaagccaccgttgggattcctgatgacggtgctcattgacttgcgcactgagttaaaggtgtacaccttgtagagcttctcctcgggcacttcattacgcacagcctgataatcctgcttcagatctgtgacaaagcctagcagagcacactcggtcttgttgcccacctgccgaggcaggcctccctccttctctggaggcagaatcttggaggtataagcactgttgatagaaatgccattgacaatgaggtccaggactttgggcaggaagacatcagggcttgggatttgacggtaatggatgcccccaatataagcttgtaccacagtcatgcggttcatggtcaacgtgcctgtcttatcagagcagatggcggtggcgttgcccatggtctcacaagcatccaagtgccgtactaggttattgtctttcatcattttcttcacagagtaggccagtgagatggtgacagccagaggcagcccctctggcacagccaccaccagtacagtgatgccgatgatgaagaacttgacaaagtactggatgtagatgggagtacactcagggagccatggtctgcgatttatcacaaagttgtcaatcacaaagtatagaatcaggatgaaaaccgtgagagcagacatgagcagaccggctttcccaatctgaacagccaggcgagtcagcttgccctgcagcactgacttctcctttttaggcaccttgactgccttcttgtccttttcctcattgtcgattccctcctggctgttgagtggctggatttccagggccactccgtcttgggtctttgctttgttgcgattttcagggactccttgttttttacctttcttctttttctccccttcgtcatcctcattgacccccaagagagtaaggatgattccagtctgagagttgacaccaacagctgtcaccaccatccggccagaaccttccatgacatgggtccctgagagcaacatggggtctttgtccagggacttcttgacatggtcagattcccctgtcagagagctctcatcaatcttcagatcattcccttggatcaggattccatctgcaggcagcagatcaccgtatttgacttgggcaatatcaccaaccacaatctcagccacagggagctggatgagttgaccgtttcggatgatggagaacttttgctcctgttcaatgcggcactgcagcccccggaattgcttctctttgctccaatcattaaaggcagtcactaacaccacgatgatcactgagaaaaggatggctgccccctcaatccagccagcttgtgcctcattttcatcttctggggtagttgcgacttgaccacacagttcattttcttcaccagcagggcgataaaaggacaggaccagggagatgatggctgcaatctccaggatgatgagcgtgacatcttgaagagcttcccacactaattctaagaaagtcttgggctttttgggggggatcacgttgtgtccaaacacctgcctacgtttctccagatctgcagggttcccagacagaccttccacaggggaggttttcagtctactgcagagattctgtacacctccatagtggacattaatctgggtcagtgcatccctcgaacgcagctccatgagcttcctcagttccattactgtgcagccaaagtccccttcacggctctcggccatcgagttggcaggcaagacacggtctgatgggttcgtcattttgcctgctgttaccaagcccctcaaccagagaagatgtagcgtttcccttcaactgaccagtgtctcctgcctccctgtctcaacttcttcctacttcttgcttctctgggggcccagtgagggaatagattgaatatatcttgtgcaataagctcccgagtagccgtccgaagtctagatcctttcttctctatgaagtctggcagcgagaggaggaagaggatgggggaactgagtggaaggtggactccgtgtcacgatgattggtgtccccaggtggtgatgatagtggttgtccagggtaggtaggttcctagcttagaccaacttgcccagatgaaggtgtaaacaggatgtgcatgttaccatggcagcaaccttagcaacaaccagcaactgtagtggtagacgtcaggaggaggaagaggagagcttcctggataccgatgacaactggatctctctctttctagcaaagatccaggtttctccaggcgggactctccctccgggtttccatggatgagggtagggtggggtgaccacccaccagtctccccagtgtggcaaccaagctagagacgctggctttgctctcttgcctttctggctaaggccggggagtgggctgggtctcctccccctgcccctccaatgggaaggacctctcaggttcctgaaagaaaaagggtgcaggagagctgggcgggtgtctctgatcttgctctcttcggagggatggtgccccacgaagttcgtgccccccctcccagcccccagctttggacgatctcaacagcagagctttcttaagaaaatgcttgtcatggcaacagctctagctaactcgggccagactcttgctcaccagctctcc

SEQ ID NO: 290 - DNA, 4595 bp, Homo sapiens
  misc_feature: Incyte ID No: 350440.15
gctggttgttgctaaggttgctgccatggtaacatgcacatcctgtttacaccttcatctgggcaagttggtctaagctaggaacctacctaccctggacaaccactatcatcaccacctggggacaccaatcatcgtgacacggagtccaccttccactcagttcccccatcctcttcctcctctcgctgccagacttcatagagaagaaaggatctagacttcggaccggccactcgggagcttattgcacaagatatattcaatctattccctcactgggcccccagagaagcaagaagtaggaagaagttgagacagggaggcaggagacactggtcagttgaagggaaacgctacatcttctctggttgaggggcttggtaacagcaggcaaaatgacgaacccatcagaccgtgtcttgcctgccaactcgatggccgagagccgtgaaggggactttggctgcacagtaatggaactgaggaagctcatggagctgcgttcaagggatgcactgacccagattaatatccactatggaggtgtacagaatctctgcagtagactgaaaacctcccctgtggaaggtctgtctgggaaccctgcagatctggagaaacgtaggcaggtgtttggacacaacgtgatcccccccaaaaagcccaagactttcttagaattagtgtgggaagctcttcaagatgtcacgctcatcatcctggagattgcagccatcatctccctggtcctgtccttttatcgccctgctggtgaagaaaatgaactgtgtggtcaagtcgcaactaccccagaagatgaaaatgaggcacaagctggctggattgagggggcagccatccttttctcagtgatcatcgtggtgttagtgactgcctttaatgattggagcaaagagaagcaattccgggggctgcagtgccgcattgaacaggagcaaaagttctccatcatccgaaacggtcaactcatccagctccctgtggctgagattgtggttggtgatattgcccaagtcaaatacggtgatctgctgcctgcagatggaatcctgatccaagggaatgatctgaagattgatgagagctctctgacaggggaatctgaccatgtcaagaagtccctggacaaagaccccatgttgctctcagggacccatgtcatggaaggttctggccggatggtggtgacagctgttggtgtcaactctcagactggaatcatccttactctcttgggggtcaatgaggatgacgaaggggagaaaaagaagaaaggtaaaaaacaaggagtccctgaaaatcgcaacaaagcaaagacccaagacggagtggccctggaaatccagccactcaacagccaggagggaatcgacaatgaggaaaaggacaagaaggcagtcaaggtgcctaaaaaggagaagtcagtgctgcagggcaagctgactcgcctggctgttcagattgggaaagccggtctgctcatgtctgctctcacggttttcatcctgattctatactttgtgattgacaactttgtgataaatcgcagaccatggctccctgagtgtactcccatctacatccagtactttgtcaagttcttcatcatcggcatcactgtactggtggtggctgtgccagaggggctgcctctggctgtcaccatctcactggcctactctgtgaagaaaatgatgaaagacaataacctagtacggcacttggatgcttgtgagaccatgggcaacgccaccgccatctgctctgataagacaggcacgttgaccatgaaccgcatgactgtggtacaagcttatattgggggcatccattaccgtcaaatcccaagccctgatgtcttcctgcccaaagtcctggacctcattgtcaatggcatttctatcaacagtgcttatacctccaagattctgcctccagagaaggagggaggcctgcctcggcaggtgggcaacaagaccgagtgtgctctgctaggctttgtcacagatctgaagcaggattatcaggctgtgcgtaatgaagtgcccgaggagaagctctacaaggtgtacacctttaactcagtgcgcaagtcaatgagcaccgtcatcaggaatcccaacggtggcttccgtatgtacagcaagggcgcctctgagatcatcttgcgcaagtgtaatcgaatcctggaccggaaaggggaagcagtgccattcaagaataaagacagagatgatatggtacgcactgtcatcgagcccatggcctgtgatggactccggactatctgcatagcttaccgggacttcgatgacacagagccctcttgggacaatgagaatgagatcctcaccgaactgacctgtatcgcggtggtgggcattgaggaccctgtgcgcccagaggtgccagatgctattgccaaatgcaaacaagctggcattactgtcagaatggtgacaggtgacaacatcaacacagcccgggccattgccaccaaatgtggcattctgacacctggggatgacttcctgtgcttagaaggcaaagaattcaaccggctcatccgcaacgagaaaggcgaggtagagcaagaaaagctggacaagatctggcctaagcttcgggtcctggcgcgatcttctcccactgacaagcacaccctggtgaaaggcataattgacagcactgttggggaacaccggcaggtgcgtggctgtcactggtgatggcacaaatgacgggcctgctctgaagaaagcggatgttggttttgccatgggcatcgcaggcacagatgtagcaaaggaggcttcagacatcatcctaacagatgacaacttcaccagcattgtgaaggcagtgatgtggggacgaaatgtctatgacagcatctccaagttcctgcagttccagctcactgtcaatgtggtggccgtgattgtagccttcactggagcctgtatcactcaggattccccattgaaagctgtgcagatgttgtgggttaatctgatcatggacacttttgcttcattggccctggccacagagccccctacggaatctctgttgaagcggcgcccctatggccgaaataagcctctgatctcacgcactatgatgaagaacatcttgggccatgcattctatcagctcattgtcatctttatccttgtctttgcgggtgagaaattctttgatattgatagtgggaggaaggcacctctacattcaccacccagccagcactataccattgtttttaacaccttcgtgctgatgcagctcttcaatgaaatcaactcccgaaagatccatggagagaagaacgtcttttcaggcatctaccgcaacattatcttctgctctgtagtcttgggcacattcatctgccagattttcatcgtggaatttgggggtaaacccttcagttgtacaagcctcagcctgtctcagtggctgtggtgtctcttcattgggattggagaacttctgtggggccagttcatctccgcaatacctacccgatccctgaagttcctgaaggaggctgggcatggcaccaccaaagaggagatcaccaaggatgccgagggactggatgagattgaccatgctgagatggagctgcgccgaggccagatcctctggttccggggcctgaaccgtatccagactcagatcaaagtggtcaaagcgttccatagttccctccacgaaagcattcagaaaccctacaaccaaaagtccatccacagcttcatgacccaccctgaattcgccatagaggaggagttgccacgaacaccactcctggatgaggaagaggaggaaaatcctgacaaggcttctaagtttgggactagggtgctcctgttggatggtgaggtcactccatatgccaatacaaacaacaatgcggtggattgcaaccaagtgcagctcccccagtcggacagctctctacagagcctagagacatcagtttgaattttctttctctgactctcatccctattttacctatttccattttcgtctgtcccatctatgaggtgatgatgggacttttcatcgtcacgtcagctgctgtgttaacagcagtgtgtgtgaagtgaacctctacctgaccatgaagaggcaagagcacagacttacaaggatttcaacttaagcttgacttggggtttgtagcgggacccagtcaaaccccattcaggtcatggtagaatctactccttggtagtcacttgtcatttttaaagaaatgatgacaatcctcttggcatcaccccaccccacattctccccgatgttcctatcctgaattctggattttgtcctacaagtctgtgccatttataagctaagttgagggttcagagggagacaaatatccccaagtgaaatatgttgcggtagagatggaatgtataaaatccgccagtagtgtgattgtttttcaatttttcccactttgaaaacttacacctaaaggcctgtaggcctctaactctttctgccctttcattcaaacctctccaaagttctttgtcttttgtcttccc

SEQ ID NO: 291 - DNA, 2877 bp, Homo sapiens
  misc_feature: Incyte ID No: 992455.56c
  unsure 1351-1682, 1839-2024: a, t, c, g, or other
tgggattatagccatgcatcaaagcagcttggccctattagtacattttaatcagagattaaactatgttgcattttaaatttcagtttaaaaaaatgattcacacgttatacacaaggacaattttaatcctgcattttcctggagtaacatccactgctggctatctatggattgtaactgcatttgctaagaactgtgaacacaaagaaactttacatgaagtcacatgttgatacaggcacacagacatctttcagcagcaacagactacatacataacgcataccagatagtctcgatggataaatctgcttcaccagtaattctatttagtaaaatccacagttaatggagaattccattttttaattttacatctttactacacatttttctaatactttatttttaaaaaacactcattcaagattgtaatttgcatggcgataaacaagggttccatgggttctaagtttcttaaaagtgtccacagcaacttaaaacaccacaagtcttctttccaatttgcagcacctgacttaaagtttaaattcatcaaatacatcattaaaactgtcattttctcttgtgagaagacatgtttcaattgctatttccaggactatatattgagcatgggtgtacagtacttttaactggttagcacaattttactcacataatttatagccagaataagaacctctagcctctctgaacggccttccactcagagcagatgatgacgataaatgtctaaaatgtatctggggtactccacttgacattaccaaacatgcttccaaataatcttagaaaatatgattctttaaacatatgcataatattctaccacacaatgcaccatcacttctttaaccatttcccaattgttcatttataacatttgcaattttttattataaataatattgtgatgaatactttcatccataagttttatgcaaggctgattatttcttctaatgtcttctaatgtcaaagaagtggcttactggttcaaacagcgcacatacatggttttaaggcttttagtatactttaccaaataatctccagaatagctcaaacaactcctaccaacagttatgttattgtgcccacagggtggacttcataacaacacagcaaattcaaccacagatctattagattctcacccatctcaaaactatcacatcaaagaagcaaggagacatattactggtgaggaagccaaattcaaattcttttaaaaaatcactcagctttagatcagtaaaattatcaacaaaaatgctccccacaaagtctaccgggtttttcaaaaaataaagttaaaaagagnnnnnnnnnnnnnnnnnnnnnnnnnnnnnnnnnnnnnnnnnnnnnnnnnnnnnnnnnnnnnnnnnnnnnnnnnnnnnnnnnnnnnnnnnnnnnnnnnnnnnnnnnnnnnnnnnnnnnnnnnnnnnnnnnnnnnnnnnnnnnnnnnnnnnnnnnnnnnnnnnnnnnnnnnnnnnnnnnnnnnnnnnnnnnnnnnnnnnnnnnnnnnnnnnnnnnnnnnnnnnnnnnnnnnnnnnnnnnnnnnnnnnnnnnnnnnnnnnnnnnnnnnnnnnnnnnnnnnnnnnnnnnnnnnnnnnnnnnnnnnnnnnnnnnnnnnnnnnnnnnnnnnnnnnnnntaccaaatgaccaaaattttttatttgactaaattctattcatgcatgagcatgacagtctcccgtttatttgactttggcaataaaaaaacaagcagccttgtacagaacagtgaaaatgccaaggacgaggacagtctacagttttactgtagannnnnnnnnnnnnnnnnnnnnnnnnnnnnnnnnnnnnnnnnnnnnnnnnnnnnnnnnnnnnnnnnnnnnnnnnnnnnnnnnnnnnnnnnnnnnnnnnnnnnnnnnnnnnnnnnnnnnnnnnnnnnnnnnnnnnnnnnnnnnnnnnnnnnnnnnnnnnnnnnnnnnnnnnnnnnnnnnnnnnnnnnntaaaaggcctctctccctttggccatatcaactctcagttcaggccattaaatacagacaaattttcaaattcacttctttacttctccaagatcttcgatgctgtcatcatctacctctggccatttttcctgaatgacatcaattatgtcatctgtaaaatctccctgaatgataatttcatcctcccctgttactgaggcaccacaggagaatttttgagcaaaaaatctttgtgcttctttaagatcaatttcaaaagttgcaaggccacatactcttgtcacatatttcttctttgctctgggaattttggctatagtaaccttttgtggtacggtcttctttttttgttttatttgaccccttccacctctcttctgttttttcttctcctcttcttcccctgctgttccttgaccctcactaattccagcttcttgtttgggtgaattttctacagtaagttttgcaaattcatttggaaaattcttctctaaccattgtctacatttagcaacatcaggcatatattcacagtactctgttggtaatgaacagactccacaataaaggactcgaagtgggtaatcggcatctaacttggcactgttccttgggtctcctttgcagtcagccccgctggattcagaaatgtcagcagccatttcacaaacccaggcggtcgcacaggccccgccggctccgctcccgccgctatcgccagctgaaccaacacatgcaactcgtctccccggccagggccgcccgagcgcccgaccgccagcagcgctcccgcgagacaatgagcctttatcgcgagattccggccgccgctgggcggatgtcgcga

SEQ ID NO: 292 - DNA, 1256 bp, Homo sapiens
  misc_feature: Incyte ID No: 997395.4
ccgggcagccgggatttaaattcacggtggctgagtcttgtgacaggatcaaagacgaattccagttcctgcaagctcagtatcacagcctcaaagtggagtacgacaagctggcaaacgagaagacggagatgcagcgccattatgtgatgtactatgagatgtcctatggcttgaacattgaaatgcacaagcaggtggttttcccgctgtatccttcagagaacaatgactgatgttgcagattgcttgaaagttttcatgactggagcactcaacaaatggtacaagtacaatcatgatttgccagcacggataattgtgtaccgtgctggtgtaggggatggtcagctgaaaacacttattgaatatgaagtcccacagctgctgagcagtgtggcagaatccagctcaaataccagctcaagactgtcggtgattgtggtcaggaagaagtgcatgccacgattctttaccgaaatgaaccgcactgtacagaaccccccacttggcactgttgtggattcagaagcaacacgtaacgaatggtatgacttttatctgatcagccaggtggcctgccggggaactgttagtcctacctactataatgtcatctatgatgacaacggcttgaagcccgaccatatgcagagacttacattcaaattgtgccacctgtactacaactggccgggcatagtcagtgtcccagcaccatgtcagtatgctcacaagctgacctttctggtggcacaaagcattcataaagaacccagtctggaattagccaaccatctcttctacctgtgatggcatgaactactggcatcactagatggacaatccaagaagaaattggtatactttgtgcaaatctgccataagctcaaggctgtgactggggaaaaagattgagcttagttttcatgtctaggaaaaaaagcaaaacaacttaatctgaaacagttttaaaaaatgtgtgttattttgttttaaagagttgtatgcttggggtaaattttcattgtcatatgtggaatttaaatataccatcatctacaaagaattccacagagttaaatatcttaagttaaacacttaaaataagtgtttgcgtgatattttgatgacagataaacagagtctaattcccaccccaaattttgctgaggttttcttaatgttgtagagcattttgtagagtggtttaaatagttgaaaataaagttcagaacatcatgtgtttattgtta

SEQ ID NO: 293 - DNA, 223 bp, Homo sapiens
  misc_feature: Incyte ID No: 017821.1
  unsure 98-137: a, t, c, g, or other
cataatctggattgcagggctgatcgttgctaatggagtgttatggctgttcagatgacagatggagaaaatgtactttgtaaactgttagttcaatnnnnnnnnnnnnnnnnnnnnnnnnnnnnnnnnnnnnnnnncactgaactttattgccattgataacttttaaatggtaaattttgtgtattattttgtcacaataaaaagtttgaaaatcgaaaaa

SEQ ID NO: 294 - DNA, 2073 bp, Homo sapiens
  misc_feature: Incyte ID No: 201436.4c
aaaaatacaaaggttcacattggtcttaggtagatacaggcgaaaaaggattgagctgtttagctcagaaacaacaaaaacaaagtttctaaagcaccactaaattatataaaaatcagaccatggacggattgaaactggtattctggtgaaatactttactattttgtaaaaagttttacaaaaaattacaaattaaaagtatcaaccctctgagttcaaagcagcattttgaaaatgaactggtagttaatcctgtaaccacccttagagttgtaagtggcccttgggaatagggatggatgggttccacctgtttgaaatcctcgaaaaccctcctaactccctgcctgtccccctccccgtcagcactgtccttgggaataaactgtcctttgtaagagtggtgacggtaaaatgaatttcagatgggttacacacactatcacttgtctacctgatgatccaccactaagaccaatgcccacttctctgatgctacccttcttgtgggattagcctcctgcaaagactctggaattggagtatcctactcttgcatttcctttttaacttaggatcccaaatgatcactttgtgccctgaggcccttcagaagatttttaaatggctgtgggacaagggctttgggagctccttttgggagaaggcagtccctctggtgagggtgagacagcagtgagcttagttcatcagaaccagctctttggtgccctccaagtcgggagtagggggaaggggttgaagctgcatcttttaaaacaaaagcaaaacaacaagttccctgactgagccagctaaatggaatcctgtttccatgcagaaacttgctcctgattctgccatctctagggcttcaggtgtagtttcactggaaaggaggagcccacccaagaggtggggtcgacatgatgaaatccattgtcctggaggggcctgggaggcccaatggactttaacaacatattctttcctttctcttgaaaacacattgaacctacgctcttgccgcagtactaaggcaggctggagggtggtcagttccaacagcttgaactcagaaaaacatgacttcaaactgtagcttatgctgatctttagatctaatccttgtgtgggtagggggagggagccccttccccagtctttctcactcctgtctgccaagaaatgcaaacggttcatgtctagcttgggtactgcctctgggaggagaagtgacacgttaagtaactgataccaggaattctagggtggcgattgtctctgccaggttttaacattaagattttcacaaataattgcctggggtaacatttttgcaaaagatcttactgattactttgtagtattgttcacacacaaaaataaatatttacacgaattcaaatgttgagtagtactgagcaggtggggccagatgtgtggatggctggggtgtgggagaggccttgggcactggaggttgtgctgtgctaagggtgagtctcaggtgtcctggccctgaccagaggcctggggattggtcagatggaaggcagaggtggtgtggctggatggggtattggaggccacttgagagataacaaccacccccaacctctaggggccggaagtaagcacggggtgggcaccctacctttcagagttctggacctgaggcaggatggggcatcctcactggtgccccccccatccctccttggggggagtctgccacagtgccgggaggcagtggccacagctgcaacaggcaattggctgcagaaaagctggtttgggaaggggtgcctgttctgggagcgagtggctctccgtggccatcctaggatccactcggccctggctcccctggggcctctctgctctgagggaggaaaggcaacagagggcttctgccagctctgggcaggggcgggcagcagagagctgctgtcatggctacggagtgttgcacggagaggccctgggggcctgctgaggtctgggcgagtccctggtttagcagcactggtaggtattgcactgagcaagaggaagtgcctatcaatc

SEQ ID NO: 295 - DNA, 2028 bp, Homo sapiens
  misc_feature: Incyte ID No: 201436.3
cccacctcttgggtgggctcctcctttccagtgaaactacacctgaagccctagagatggcagaatcaggagcaagtttctgcatggaaacaggattccatttagctggctcagtcagggaacttgttgttttgcttttgttttaaaagatgcagcacatccccctttcgcatactcccgacttggagggcaccaaagagctggttctgatgaactaagctcactgctgtctcaccctcaccagagggactgccttctcccaaaaggagctcccaaagcccttgtcccacagccatttaaaaatcttctgaagggcctcagggcacaaagtgatcatttgggatcctaagttaaaaaggaaatgcaagagtaggatactccaattccagagtctttgcaggaggctaatcccacaagaagggtagcatcagagaagtgggcattggtcttagtggtggatcatcaggtagacaagtgatagtgtgtgtaacccatctgaaattcattttaccgtcaccactcttacaaaggacagtttattcccaaggacagtgctgacggggagggggacaggcagggagttaggagggttttcgaggatttcaaacaggtggaacccatccatccctattcccaagggccacttacaactctaagggtggttacaggattaactaccagttcattttcaaaatgctgctttgaactcagagggttgatacttttaatttgtaattttttgtaaaactttttacaaaatagtaaagtatttcaccagaataccagtttcaatccgtccatggtctgatttttatataatttagtggtgctttagaaactttgtttttgttgtttctgagctaaacagctcaatcctttttcgcctgtatctacctaagaccaatgtgaacctttgtatttttgctcctaattttggactcagtgaaagtgtactgtttacatgtacagatgcccccagtccctgtgtgttctgcaagacttgctcttgaggaggaagatgcacctcactaagctcatctgcttagcaaagccacaaacaaaaacctctcactttttacctacgtttccacctaaaaatacaacaaaaaacctataccacgtagaactcagattggctgaaaaacactttccacctggtagatggcccatatgcctcaattatgtggtccatttaggagcaggagtcagaagagagacctcttattggctgctggtgggtaactgcatggacagaggaaaagggaaggcaggactttgctgcagagctgtgggatgaatgtagttcttccctgggcagcctgggagtgggaaggtcagaatgactcatgttgccttcaggatcaagccatccaggatttagggacaacccaagaggtctttagtcctctggcataatttagacatgttttggaagagcatgagttccatatctgagatgagatttaagactttcagtgcagatagtacaagccatttcttcagggttcctctgggggcagctccttcatgaggtcccacctccggggaggggcacagggctccagatagtaagcacttaaggcaaacagtggatggcaccaacttttaaaggtgactctattaatggcttcacctctaaattatatttttacagatatgcacctatgcaacttaacgtggctcttctaagcaggtgaggacttcctcctcaatgctctctataaaaattatttgtgttctatatagtgagttttaccagtaaatgtggcttaatattttaattcttagaatgtgtcttctctacgtgatgtgactaaattctgttttgtttgtggaatgactagcacaggccgactccctctctccctcacttaacaaaagaccaatgagctgttaatcgagctgttatctccatggtattacttgctaaatgcactgatttcataagtatgtggaatccttttccttttgaatctgtatatcatatataagactgaatctacttaataaacactgaacaacaaaccg

SEQ ID NO: 296 - DNA, 3567 bp, Homo sapiens
  misc_feature: Incyte ID No: 198947.1
gtgagcgggcgcgctggtccaggtgagcgggcgcgtccccgcgacggcgctgcctgcccgaggcggttcacgtaaagacagcgagatcctgagggccagccgggaaggaggcgtggatatggagctggctgctgccaagtccggggcccgcgccgctgcctagcgcgtcctggggactctgtggggacgcgccccgcgccgcggctcggggacccgtagagcccggcgctgcgcgcatggccctgctctcgcgccccgcgctcaccctcctgctcctcctcatggccgctgttgtcaggtgccaggagcaggcccagaccaccgactggagagccaccctgaagaccatccggaacggcgttcataagatagacacgtacctgaacgccgccttggacctcctgggaggcgaggacggtctctgccagtataaatgcagtgacggatctaagcctttcccacgttatggttataaaccctccccaccgaatggatgtggctctccactgtttggtgttcatcttaacattggtatcccttccctgacaaagtgttgcaaccaacacgacaggtgctatgaaacctgtggcaaaagcaagaatgactgtgatgaagaattccagtattgcctctccaagatctgccgagatgtacagaaaacactaggactaactcagcatgttcaggcatgtgaaacaacagtggagctcttgtttgacagtgttatacatttaggttgtaaaccatatctggacagccaacgagccgcatgcaggtgtcattatgaagaaaaaactgatctttaaaggagatgccgacagctagtgacagatgaagatggaagaacataacctttgacaaataactaatgtttttacaacataaaactgtcttatttttgtgaaaggattattttgagaccttaaaataatttatatcttgatgttaaaacctcaaagcaaaaaaagtgagggagatagtgaggggagggcacgcttgtcttctcaggtatcttccccagcattgctcccttacttagtatgccaaatgtcttgaccaatatcaaaaacaagtgcttgtttagcggagaattttgaaaagaggaatatataactcaattttcacaaccacatttaccaaaaaaagagatcaaatataaaattcatcataatgtctgttcaacattatcttatttggaaaatggggaaattatcacttacaagtatttgtttactatgaaattttaaatacacatttatgcctagaaggaacggactttttttttctattttaattacacataatatgtaattaaagtacaacataatatgttgtttctctgtagcccgttgagcatatgagtaagtcacatttctattaggactacttacaaggacaaggtttccatttttccagttgtaaaattggaaccatcagctgataacctcgtagggagcaaccccaggatagctaagtgttatgtaatatgcctagaaggtgatgtgaatgcgattcagaagcatagccactcccattttatgagctactcacatgacaaatgtcatcttttgctataacctttgccaagttagagaaaagatggatttaatgagataaatgaaaagatatttaacctaatatatcaaggcactatttgctgttatgctttgttatttatttcccagcacttgttccttattgtagattttttaaagactgtaaccttttactaactgtggtcttactaaaatttgtgcttgatactgcttttcaaaaagcctttaattagagccaaaaggatggaaaaggcaagatataaatgccttttatagatctcttatttacattgaaaattattaccatatgtttagagcaaatccaagaaaacttcaacagcttctgaagatgtctatgaatgttgaaaacttttcaatctcttggaatgctcagttatgttcctagaccggtctttgctgactactggttgttaacctttccctagcctgggacctcaagccatatatatcctttgggtgacccatggccaaagttattaagatgaactgactttcaaagtcagagaaggacagcatagggagaggcggttatttgtaagtcattacaggtagaacagggcagaaggaaaagtatgttctggagaaagggccatgttcctaactttggagatatgtcattgccgggaacctagtatcttccaacttgaattggtggcagctgttccagtgagacaaggcacatgtatgccttgtggctaagtgagcaaactgggtttccacttaaatgtttgggaccctcaattgattctttatttcaaacctttataaaaggtacagttttgtaagccattattaataattaatgcttatcggctgagccaccgttcccggcctattgtagattttcttaactacttgctaaggaaatcatatccttttacatgaactacaggtttagaacttggttttaagacaactgctatggccagaaggtaaatgggaattgccttattgaaggtaacattgattgcctaataagaaaatgaattgtttgccacagagttgaatttaatttgagttagatagttcagaatgtagcacttgccctataaatgaatcagatttgttctatttatataatattagaattaatatattatcatgtaagtgggaattttattttgttaagtggactctcaaattttagaacttgtgtgaaatatctcccagaaaacacaaaaggtttcaaggtatcacccaaagctagggaatcaacaaacgtactttattaatgcaagaccacaatttaagccccaggcaggaatccaacagtaacatttttcctttaggttaagcagtaatttttttgaattgtcatttttaatgggtctcacacatgcatattgctaatatcattcatgtttgaggttttcaacaaagaaccaatttattaatataatgtacaaaaatagttggttcattttctgaattcagtctttgaaataaaactccttgttttggccgtgtttctgaatgtattggtgattcacccccaagctaattttttaaagtcattttgaagttgggaagtctcatgagagatgttgaagtatgtatttaatcaagagtcatgatttcaaactagttttacatattaagcagttagtgttctaatttaatgggtaaatgtgtgtttggataaatatctgaaaattttatccttaagtatatataattatttgcctcttatatgtcttaaagctatttaaacaaggtgttaaatgagccaaaacaattaagtaattagaacagtacatttttatcagtctgtcatatgcaatgaatgtatgtaatactaaaaaatcatgactacttttatcaaagaaaaaccacacattaatcctattaatcatgaaagcgtagcattgtaaattaaaggttttctttgaggctcttgaaagtgatcccattgctttcctgttttaaaaatattttatgctctttatttccacttctgtgaatgtgatatttctattttgtgattatgtta

SEQ ID NO: 297 - DNA, 639 bp, Homo sapiens
  misc_feature: Incyte ID No: 1135407.1c
ttttatgttgctcatagttattttttatttgaaagaaaataaactgattagagataaaggggatatcgtaggcaaggtaagtagttggatgaaatcacaggaagcatgaatagttgtgaccaattgcagaagactcaagctgattccatctcagggacacactctaccattcgggagatccccaacccatttgggtaaaactggaatgtctttacgagcagtggtagaagcagcggtggttgcagtggtaggagcagcagtggtcgcagtggttgcagcagcagtggtttcagcatcaggggcttcatcatcagcaggaccagtagctggatacgtgtcagctggagcagctgttgtcggattctctgagtgtacaaaacatccagtctgtttccaaagttttttttctgttttcagcctctaatcattgcttttggggatccctcagggatccctcagtctcttaaggagagcccccaatggaggccaaggggtctatagttcaagtgactgttgggagctgagaggttgaagtgggaaatgaaaagcctggcagaatgaacagagggatgaaggtggtagagttaaaagggggatatatcaaaggcttcaaggtcgctgaagggaagatcaaaagtg

SEQ ID NO: 298 - DNA, 363 bp, Homo sapiens
  misc_feature: Incyte ID No: 200046.1
ctcaggggttgaggggtcccttcataggtaggcagggctgaatccctaaggaaactggtaggaagtgtggaggagctagacttgtcatggaaggggtttggagccactggagcctttaaatcaggatagagtcatgatcagaattgcattttaggaaaatccctttggtggctgaatggagactgtggactggatgggcgtgggatggtggcatgggagctatgaggcctttttgaaatgtcaatactaaaacatagttgatggcctgctttacacgatgtttcctctacagcagatagtgagtttccaacacaaaatttatttccataaaagtcttggataaagtcaaaaaaaaaaaaaaaa

SEQ ID NO: 299 - DNA, 1971 bp, Homo sapiens
  misc_feature: Incyte ID No: 981489.1
  unsure 849, 852, 858, 863, 868, 871, 876, 886, 902, 905, 920, 927, 939, 1767,1771, 1796, 1808: a, t, c, g, or other
aaaattttaaaaacagccagaaaaagtataatttatactggttagggtttaagatggcatggatttgacaaagataacaaagacagaatcatctatatattcattcattacgtgttactgtagtttattggaatctgttaatgccttcctctagtagttaaaggtttatcagtatttctattataaacctctattttcaggggtttcaatgtgcccttaaaattgtgctggggctgcagcaaataaataatattgggactcatattcagtctttggaactagttttttttccatttaatttaaatgacaaaattgcatagggataaatgtacagttttactaaggtttagcacctttgatcttttctaaatcaggaaaaaaatctatgcatattgaggttcacagatgaaatattctttggcatactttgtagactttgaccacttaaaatactaagtggccaaatgataaaaaaaactgctccctggcacatgagtgtaaaaacatgtttgtaattttaagtaaaatggactgatacccaaataccacagactcacactatattacagaatgatgtaatacctggtaattctccagaagatagacttcagacccttaatgccatttaaatatagtttttgtggtttaatcttatgagtagattgtaatgaaatcattacctttgaaacatcaaacacttctttaagctttttttttttaatgtcatgaatcaggaaggatacatagtgattcgtatacaattttgtctgcagcattcttgaatatttttaacactgtgtaatccctgagcagcacaaaacttttattccgatgaccagttacacaatnccngttttnatttngcccngtngggcncatcttctangaaaaataaatgattnttnggccttgctttcccngcaagtncattaaatgtanaatgttgtctttttaagacaccgtggctgagtgctcctaagccatctgttaaatgacttcccgtggtctgcgtgtgtgtgttcatgtgtgcgccagtgatgggcctctcctcaaacccacgactgtctgcagcgtctcagccgtcagaatgaaaacattatcaatcagtacccaacaacagctgtttttgacaagtttctgtctgacgcctaatgctttacaactgtcaataaggctccctctttgtctagcaggtcggagctcgctgtcttgctgcttccgcgcggcatcctgtccttgtaaccctagaatttgccatgttttggaaatccacgtgggggcggggtggggcctgaacgggtggggatgggtgggtgggtggtggggtgggtgggatggctgggggtgggagtgtaagtcccttttcctactttcatgtaaagtgccacaggtgtcttggtttgcatattcaaatattatataggaaaaacagtctgttatgtatttcttcacctagcttcttgtaatatttatggacgtttccagtttttgtaccttcttagctaaagcagttgcctttttgtaatggcaattaatttatatgataaaactttgtatccactgtagttgacagtattggttgctaattaactgccatattgccctgtctttctattaaaaaaatactgtacctgtacttagaggctaacagattcatgtggacatttaccaggcaagaccaacttgtattgtccatgatttctacgatttccactatcttcaaatgaaaaataaacgctgagtagaactgatgttttcagactaacncctntcaactttagcatttgggagtcccngatttctgtttncgtttgtgtcgcctgtttgtctccaaaataagttctgctgctcttgggtcaaaacaaatgattaattcgcatttcctttgaagccattgtgaaaaccttaaaagaaaaaataaagagaaaaagcaagtatcttttccagttggtttgtcttcagcagcaattt

SEQ ID NO: 300 - DNA, 307 bp, Homo sapiens
  misc_feature: Incyte ID No: 019362.1
ctttattgtatggatgcctttaaacttagtagacaaaggtttctttttttcttaatcgagaaactttcaatattttacagtagtttgaattactgctaactctaacatactgcttgttttattatctttaaaaattgaatgtgcatatccttgatatgaagaaaatctcatcaggcaattgaccccaaatatgtcagggtatctaaatttttgtcacttgtagtaatttacattttttttcctgtccttagatatattattgtgtattgaaggaagtattcatgattaaattattcacagttacttg

SEQ ID NO: 301 - DNA, 607 bp, Homo sapiens
  misc_feature: Incyte ID No: 217116.1
atctaagggagtagatacagggagacatgatttattggtcccaatgattcatacccttaccatgtgcaagattaactcacccccctcccacgatccccaaaagtttcatcttgattcaaaagtccagtatcttatgtgtaacagtctggatgtagctaaagcttcttcactggatcctttttgagtcagatacctgtatactaaaaaggcaagtcatttgtttccctccaccccaaacattccctacctaacatacagtggtgagagagagatactgcagtagatgctcccattcagaaaggacaggaattaagcatagaggaggcctctccattttgaactgtttcagatcctttggacttccttgaaagctctatgggttcccatgtaccagatttgggactgctctattaaaacaaaagctgaaatcacagtcagacaggctcacatctttggcaaggtgtcggtgctgtggggcaatgcccataaggaatctcagaagcctttttgtccagcgtggagactccactaaggcatcccctttaacacttcagaggttctaaagtttggggtcttttagccaaactttttgattcgaacttttact

SEQ ID NO: 302 - DNA, 320 bp, Homo sapiens
  misc_feature: Incyte ID No: 330530.1
tggagatctctttagctagatccaaaaattcatcaggtatattttctgttttccaagttcatgcaggcaatagctttgctaatatataatactagttgccttgttcaagctgccatatcagtttcatcactcctttcccagtccccactagcagtttgtttactggttttccagcctgtgctaatagttttcctggatgctttccaagcctctgcccatgtcctgctcccaaagctaatgccacatgttttaggtattttgttatggcagcacttcacttctgtgtaccaacttagtggcctaaagaacatagcggctta

SEQ ID NO: 303 - DNA, 1230 bp, Homo sapiens
  misc_feature: Incyte ID No: 401213.1
  unsure 1038, 1049, 1052: a, t, c, g, or other
aagagatacacttctaagtaatctatatgtcaagtaagacaaaatgaaattagaaaatatttttaagtcaatgatattaaaccatactacacatcaaaacttgtgggatgcacttaaagcagcatgtagagggagattatattcataaatgcttatggtagaaaagaaggaagtctgtacattatgtagctatgcacccatctaaagaagttaggaaaatgacatcaagtagaacatcaaaagaaagaaggaaaggataacttaaaacagaaatgaatgaaataaaaccagaatagaagagacgatctacaaatccaaaagttggtttgttgaaaatactagtagagctgacatacctgtggtgagactgatggaaataatgcagttacaactaaccaatatcataattggaaaggaaatcactataggtgctgtaaaaattaaaaagataatagaatattatgaacaattttctgccaatattattgaaagtttagataaaatggaaaattcatttaaaaatataatttgacagtattatgttatgtgaatactataatgataatcctgtaatcattaaatgaaccagtagtttaaaatttttccatatagggaaggtcagggccagatgtgttcaatggttggttctactagacattcaaaaaaataataattcaagtctacacaaactttcctgagattagaaaaaataaagaagagtccccccacctgtttcttactttatgagaccacacctaaaagatagaagactgctttgcaaccaagaaatccttcatgaacacctctttaatcacaagtcctcaactccaaggttagctttatttcaacttttataatacttttcttacttttcttgatagctttaccacccatgtattcattcctaaaaaatacacagttttgtctgattttgaattttatgtgaatggaattgtacatatctgtgtttgtgtcttccttgttttactcaatactgtttctgagatcaatcacattatttgttaatattttgtttangatttttgcanctntatttcagtgtgtgtttggaatgtaaatttccattctcagactatcttttggcctgaatttggttacatgagtatatgttctaaaaatattacttacactttcaataaattttaaggacttttatattgttatgtatcaaattttttagaatgcaagaataaatattataaaacatca

SEQ ID NO: 304 - DNA, 7166 bp, Homo sapiens
  misc_feature: Incyte ID No: 400280.3
  unsure 3495-3663, 4295-4337, 5236-5332: a, t, c, g, or other
ggccggggctccgcagagccaaagctcgcttgtccccggaaccgccctgctgccgccgcctgcttcctctgctcgcggttagcccgtcagtccctgctctgtgcgcgcctccatctgggccatggatggcggggatctgatgagcttctttcttctggcatcattaacggaccttttaccatgaatagttctactccttctacagctaatgggaatgacagcaagaaatttaaacgagatagacctccctgttcgccttcccgtgttctccatcttcgaaaaattccatgtgatgtcaccgaagcagagatcatatcattaggtctaccatttggcaaagtaactgaatcttttgatgttgaaaggaaaaagccaggctttcttagaaatggcttctgaggaagctgccgtttactatggtgaattattacactcctattactcctcaccttcgaagccagcctgtttatattcagtattccaatcacagagaacttaagactgacaatctacctaatcaagctcgagcccaagctgcactgcaggctgtcagtgccgtccaatcaggaagcctggccctttctggaggtccttccaatgaaggcacagtcctacctgggcagagccctgtgcttcgaataattattgaaaacctcttttaccctgttaccctggaagttcttcatcagatattttctaaatttggcacagtcttgaagattatcacctttacaaagaataatcagtttcaagccttgcttcagtatgctgacccagtaaatgcacattatgccaaaatggctctggatggccagaatatctataatgcatgctgcactctgcgcattgacttctccaagctcaccagccttaatgtgaaatataataatgacaaaagcagagacttcactcgcttagaccttcctactggtgatggccagccatcccttgaaccccctatggctgctgcttttggtgcaccgggtataatttcttcaccatatgcaggggctgctggatttgccccagccattggatttcctcaagctacaggtctatcagttccagctgttcctggagctcttggtcctctcacaatcacctcttctgctgtcactggaaggatggccattcctggggctagtggtataccaggaaattctgttctactcgtcacaaatctcaatcctgatcttatcacaccacatgggctttttatcctatttggagtctatggtgatgtacatcgagtgaagattatgtttaataagaaagaaaatgccttggttcagatggcggatgcaaatcaagctcagctagcaatgaaccatctaagtggtcagagactttatgggaaagtgcttcgtgctacactgtccaaacatcaagcagtacagcttcctcgagagggacaagaagaccaaggtctgactaaggatttcagcaatagtcctttgcatcgctttaaaaagccgggctctaaaaacttccagaatatctttccaccatcagccactctgcatctttccaacattcccccttctgttacagtggatgatctgaagaaccttttcatagaagctggatgttcagtgaaggcttttaaattctttcagaaagatcgcaaaatggcgctcattcaattgggatctgtggaagaagcaattcaggccctcattgagcttcataaccatgaccttggagaaaatcaccacctcagagtttccttctcaaaatctacaatctgacttttctgtgaatttttctcctaaaactggaccataatttcagtaaaaccttcagacatagactgaagcagctcaagaccaattttgcctctttcacaaaaataactctttctgagtttgatattcaagtatattttaaaaatcaagggatttttttttttttgtattccccctgcccccgccagtcaaaggtttcttttccctttttaccatggtttctacaaaaataaccttcaggaaaaagaaaatcaggaaaaaaattttttttcaataatcttattccctatattaaattagatttgaagaggattaacgttgttttagtttgggtccagatcagccttatacaacatttctaaactcatttgtacttttaaaaaatttaaacacagacttctaaaattacttgatgtaagtaatttaaatcacttatgaccaagttattaacctatgaatcagaagtctgaccctgtaggaaattatattcacatataaagtacatcagatctttgccatatattgatggttattatgcataaacacattgagttgtgttggaagcagatttataaacctgcatgttttctttgaatgatttctttttttcactgtaaggacactcctttaaataatgcctatctttaactttttaagactatttggaaaaatgcagtgtctcagctgtccccagggaaattaagtggaattcaactaagatctgttaataagatgtcagaataactaataattttattaggaaaaaatcatgttttaaatttcaaaatgacacttatttgtcaagtaatatgatcttggaaaattttaaagaaaaataatcctacttataaactacttttttataattgttttcagaaaaaaagtttacagtcttaaggaaaatattcaggtctatcatatggtttgacagattttttaaaagttatttttggtaaggtcttcttttagaaaaaaattaatctcaagggttttttgtaccactataatctctaatacttactcagaattactgtgtatttacttaatttcttattatgtgccttattatgtgcttaagatacaataggttagagtttaatctaaatatcttgaaagctatattgtgggcttggtaagcattttgttttttctttctctgttttggtaaggatttaaaatttttttcattgcaattttaagtggttttcaataagtaatagtttttatcaaatttttggtgcttggtgcagagacggtgtggggaagggtgaatggttttgggaataattcagtgcacacctgtaggcctctttacattgtgactgataggggttattgcatatcaatttggggctgtagagtgcaatctcagtttcatctttttcacccatcagaatttgtctcaggattacttggtttttctcagtcctcaagcgagaacttgcttttctttgttaatgtgactttcattactgagtacccacgtatttggagtatgagaaggtgggttatttctcatactctgtccctctctttttcattgaatgtaagagtacattttaatgttgcttcagtgattgtataatgtaaaattgtttctttttaataagaaactttgctattatttcttcaattgttgatcagaattttttaaagcagaatttgtcaaaagggtcatttttttgtctaccccttttacacttttcagattctcaaagtgtctcatctcaacttttaaaagaataaaggnnnnnnnnnnnnnnnnnnnnnnnnnnnnnnnnnnnnnnnnnnnnnnnnnnnnnnnnnnnnnnnnnnnnnnnnnnnnnnnnnnnnnnnnnnnnnnnnnnnnnnnnnnnnnnnnnnnnnnnnnnnnnnnnnnnnnnnnnnnnnnnnnnnnnnnnnnnnnnnnnnnnnnnnncatagtgtgaccccttctcttaaaagtaaaaattaagaaaatctcaatctctttgctgtattccagtgattaatttgaacatagggaggtttttacagaagaaattttaccaaaaaatagagactgcaagagatgatacagattgtttaaaaagcagaattcactcaccactgagcaacacttagttggtagaatagaaaggagggatactaagttaagacttttcaaatggatcagtttggctgaatagatagatatactcatgtatgtagttgtgggagtttttagttttttgtttttttacttatgaaataagttttgacctagacacaaggggtatatgaaggaggaaaaaaatttctttgcaaaatctcccaaaacttgcttttttttcccttccacacaggcactattataattttcagtgccatgttaaattggattatttcatttactttaagttaggaattactgtgtaatttattaattcatgattctcataacattcagcataagtgtagcaaagttgctaataacggaaggggatcatagtggtgttgaatgtaactttgaagtagggaatggccttttaagtctgagagagaacatttgaatccttttcagggatttgnnnnnnnnnnnnnnnnnnnnnnnnnnnnnnnnnnnnnnnnnnnagataagtgtatatacataaatacactcttctaaagttgtatatacatatgcacattacatacattttaatttattgacaaaattaaccaaattaagatttggagatgtgggatgttcttgttttaaaatagcatgtttgaaaccatcagtttgtgtctaaaattagctgtagcacatggatgttgtccatattaagctatttgctgtttgaattatagaggtctacagtatttgtgttggcatagtttttgtaaaaaaaagattaaaaaatatcaggatggtggaaaaactagatctgtgtatctctgttttggcatgcatttattcagtatcttctagcaatggtttttctctgttgatctaccgtagtatcctatttttaagtttattttatttttaaggagtattgtcatcacttttcaaggtgtcttgacttctacacaaagtatatatattcaggactttaaaaaatagcagtacacatttaacagtagcgaattacaccaaaatgatttactttgagatttgaataatttgcatagcagtaaaatgtgttttgtgtaacatacaaatagaaaaatgacccagtatcttaattgatacttactggagagtatcagaattacccagcagctcttacagaatgccataaattctttaagactaaatattgaaatcaattatttgaagtaatgtttctgatttactgttaaaagttgctgagctcagtttttggagatatcatttatgcctgcctgttcccttatgacagtgaggccttctttggctccacctagtatgataatcatgggttctgttttagttgatgagaagtggctcctatgaatgcctctgctcaatttctttttattttactttattttatttttaggggtcnnnnnnnnnnnnnnnnnnnnnnnnnnnnnnnnnnnnnnnnnnnnnnnnnnnnnnnnnnnnnnnnnnnnnnnnnnnnnnnnnnnnnnnnnnnnnnnnncaatgtctccgtgccatcagtcagcagtgcttacatgtttagcatattgtcatgcagtttctcttctgttcccacgagatatttttggacaaaaaattgacaaaagtacatgtgtttttccccacctatcccttagaaaacctaatgtgtactgctatttttaaaaccaaaaagagacagcgtgacgatgcgtaaagcatttttcttagcctttcctttgtcttgatctgttaatgagaacaaaactgccagactcaaaatactctactattgtgctgaaagaaatacaatttagattgcacaaaatttgaaaatataactcagctgtcttttaaaagagttgtgttgttatctacaagactattagcagtcttttttcagagcaaattttaacagctagttgtgagtggtttaaaatatagaaaattattaaaatcttagtttgaggggttttatagtgggagaaaaaacaggaccaaagtttatgtgccttcttcagtagtcttaattgaccttttcttcctatttgagactaaagtagtatcagtattctggttttcaggaaatatgtactatatagttttaaaagaatgttgtcccaccaactattcatccaagcaaagaattgtaactataaataaagtctcagttacacttttgcctttatcacataatattcattgtagagcattgtgcaggtccaagaatagagctgctcaaaatctttgtggtagtttccttagtttttgtaacctgaggcatatgttccagagaacagggatatttgtctggtccagtgaccttggtgatcatagtcataattgaaagatgcctatggcatgcttaaatcagcattgtcaactgatttgttgttgtattattttcacttcttgggatctatgtagtagttgtaataacaaatatttaaatagctatttttttgatgccattaaaaaaatcatactctggccttttttcccccttactgttgtttcccagatcttttaaaaattcatcccatatccagaaagtaccagttataaagattgctgaccaagcaaagttttgcatcaaagtgtcacctcattgctctgaccaaagactgactgttgtggttttaactcctctctgtaaagcattttgcattttccccaagctcctttctgaaagaagacccagtgcagagcggcctttactttcaatttctactgctgaatagactacttagagaaaatgtgagtttcagtgtgaacagaatggattaggatgacgagtttgatgggcattttcagtactgtatctaagaaaaaaaaaatagcacagctaggagcctctgacattgtctggtgttttacgtggtctgttcatcaaaattccccttttcagtttttaagaatgttcgtctaacagaagaaaatgctgtaaatatttgtaacaacattttttttaacaaggccaaaaaagaaaaaaaggtttttgggaacaaatgaacttataaagtggttttatataaaacatcaattgtcttgtatattttggataagcagcagtaccagctttcatttgtaacagtctgtggcattggaaaaaaaggagtctgtgattgttgaagtgaattatgttataaatgcaaagagaagataaaatattaaaaaacatattttctaaatgcgtagtgcatggttaattcaagcttctgtacactacagtatattccattttcgttcagtttgtatatttgctgactattacttgatatctctaatctcttttcctaacaaatatagcattgtagcatgccttttaataaatgtcatgacatctgtactctctt

SEQ ID NO: 305 - DNA, 1521 bp, Homo sapiens
  misc_feature: Incyte ID No: 017320.1
  unsure 56, 162, 175, 183, 200, 239: a, t, c, g, or other
cgcctgtgtgccgtttttttcttccggaccccgcagcttcctctgtgctgggctgngaactggggaggcatggctgagttcggcctccaaaggcggtctttcgtctttctctcccgagtctctccgagagtgcggtctctccgagagcgcggaggcctcggngtggacagcctgnaggagggngctctaagcgtggcagnctcggggcttcctccgtgttgggacgccgagccggagtngaggttgggagacctggcgtctagtccccgcgccgctgtttttctaagctgtgtggccttggcgagtcatttgccctctccggctctttgtaacatgagagtagccctccctgcccttccttcttctgggagcagttatgaaacagctgaggttcttgatagtccacaatgggtgaaccacagcaagtgagtgcacttccaccacctccaatgcaatatatcaaggaatatacggatgaaaatattcaagaaggcttagctcccaagcctccccctccaataaaagacagttacatgatgtttggcaatcagttccaatgtgatgatcttatcatccgccctttggaaagtcagggcatcgaacggcttcatcctatgcagtttgatcacaagaaagaactgagaaaacttaatatgtctatccttattaatttcttggaccttttagatattttaataaggagccctgggagtataaaacgagaagagaaactagaagatcttaagctgctttttgtacacgtgcatcatcttataaatgaataccgaccccaccaagcaagagagaccttgagagtcatgatggaggtccagaaacgtcaacggcttgaaacagctgagagatttcaaaagcacctggaacgagtaattgaaatgattcagaattgcttggcttctttgcctgatgatttgcctcattcagaagcaggaatgagagtaaaaactgaaccaatggatgctgatgatagcaacaattgtactggacagaatgaacatcaaagagaaaattcaggtcataggagagatcagattatagagaaagatgctgccttgtgtgtcctaattgatgagatgaatgaaagaccatgaaagatgtttctttttctttttttccttttgataatagcatcatatattagttcattttcttttggacagtcttaagagaagtttcactaaaaatgtaaacagctttaatcttgactccaaatttttcaattatgagatgtcataggcagtaatttcgctgtataacaagcatagacaaatgagtgtccctgcactaagaagaatcactttaaaaagcaaagtgttagctgctgttgtatgggacattcctatgttttagagttgcagtaaaactttgatgataacctcaataatagcaaagttttcgtctttgaaaaggggatttagcatttgctttaagaatgatagataaatggatattaagctctctacatgtaaaactatgaaatctttagacttattccatttaaaa

SEQ ID NO: 306 - DNA, 506 bp, Homo sapiens
  misc_feature: Incyte ID No: 406182.1c
accagacctggccatgtgtggcatctgaggcctgggttgatgatatctttggagaagcccttttttccaggttccttgggatactaccaagccatgagcactttacactaaagaactaagttcttcttggtctggagtttttcagggcacactggttctatgaacttaggctaaagacctgtatcagaagcctatgattacaaattctcagaaatcttgttcccttaccatacagccagacaagcaagtttccttgccctctgcttttgtggaaaggacttttcctagttaattctttccatgaggatatggctctcaagcactaggttagagacaattacagattcttccagaataactctagcctatagtgctgacttattttcccagattactactcctacttcctttttgacttctggaaaattctattacattctagtcagctcagacattaaaagttgttattttgagttctctagcatttttagtttttccagataaac

SEQ ID NO: 307 - DNA, 630 bp, Homo sapiens
  misc_feature: Incyte ID No: 244603.1
caaccagtaacgatttttttaaagggcctgtcttaattgacagttttaagctgtagacattaatattataacaaacaaaacatgccagttttactgattccgctttttgcttgattcaggaacttttcattgtttggggaagcttttgaatgcagtactgtggaggaaatcatccttaaaatagcatttcacacatagggccaaaattgaaattgtcaaggaaacccctcagcatctaacgtcatcttgtagaagagctgggcatacctcttcctctaggccaattcagaggccactggccacccaagtagagtggggcccactggcatgagtagtccctgtgcccatgcccatggtggtgcttgactttgctttggggcttaatcctagtatcatttggccattaatttttaattaagtttatacttgaataatcagttttactcctgaaaaattttgaagccagcactgactttgtttatattcacttaccttgtatatgaacttatgacattagagtttgtgaaactgtcttaacgtggctcatacacgtgatgtcagagggactggtcagttctttacagggtgaattaatcggcagctggctagtcagagcaactgatgggtggc

SEQ ID NO: 308 - DNA, 452 bp, Homo sapiens
  misc_feature: Incyte ID No: 107405.1
  unsure 4, 12, 28, 30, 42, 46-47, 64, 83, 424, 433, 441, 446-447: a, t, c, g, or other
tctngctttggnatgtttgaagtgtaananttcaatatatanattnntatttaaaaaactcatnatagaaaatttataaaatnccccaaaatatttagtataaaattaatcatcccatcaaatattaaataatattactattttaaagtgtttatttcagtcttttcctgcatgtatttatggcttttatttttaaatatagtaataaaataatttgaaattagctttttatatatttttgtatcttgctctaatgggttggactaaacatattaagaacactctcaaatgctactaaggacaatttgaaaacataattttaatgactgcataatttatttaacttttctgttttggaaaatattatttttttttattacaaataatattgtcattgagcattctctttttaaaaaaataaacnatgtgtgcntataacanggaannaaaag

SEQ ID NO: 309 - DNA, 479 bp, Homo sapiens
  misc_feature: Incyte ID No: 337024.4
ctcaaaacaagcaggagactccagcagccatcgccagcagggcatcacagatgaaaaaacatttaaagcccttaaggaagaaggaaatcaatgtgtaaatgacaaaaactataaagacgccctcagtaaatacagcgaatgcttaaagattaacaataaggaatgtgccatatatacaaacagaattatcagaaaagcttaattgatctcaataaagttattctactagatccaagtattattgaggcaaagatggaactggaagaggtaactagactccttaatcttaaggataagacagcaccattcaacaaagaaaaggagagaaggaaaattgagattcaagaggtgaatgaaggcaaggaggagcctggaagacctgcaggggaggtctccacgggatgccttgcttctgagaagggaggcaaaagcagcaggtcaccagaagaccctgagaaacttccgatagccaagcctaa

SEQ ID NO: 310 - DNA, 2334 bp, Homo sapiens
  misc_feature: Incyte ID No: 337024.3
  unsure 2269, 2327: a, t, c, g, or other
gcggcggcgccaccgggcatccgggcggcgggcagggcgcggagaacctgccggcttgaagagccagggccaacgagctgttccgaagcgggcagttgcccgaggcggccggcagtactcggcggcaatcgcgctcctggagcccgcaggaagtgaaattgcagatgatctaagtattatattcaaatagagcagcatgttacctaaaagaaggaaactgcagtggctgcattcaagattgtaacagggctctggaacttcatccattctctatgaaacctcttctgaggctgggcgatggcctatgaaactctcagagcagtatgggcaaagcttatgtggattataaaacagtgttagcagatagactgtggactccagctagcaaatgcacagtgttaacaggctatcaagaattttaatggagctggatggaccaaattggcgggagaagctgtcacctattcctgctgtgcctgcttctgtgccactgcaagcttggcatccggacaaaagagatgatctcaaaacaagcaggagactaccagcagccatcgccagcagggcatcacagatgaaaaaacatttaaagcccttaaggaagaaggaaatcaatgtgtaaatgacaaaaactataaagacgccctcagtaacatacagcgaatgcttaaagattaacaataaggaatgtgccatatatacaaacagagctctctgttacttgaagctgtgccagtttgaagaagcaaagcaggactgtgatcaggcacttcagctagctgatgggaacgtgaaagccttctatagacgagctctggctcataaaggactcaagaattatcagaaaagcttaattgatctcaataaagttatcctactagatccaagtattattgaggcaaagatggaactggaagaggtaactagactccttaatcttaaggataagacagcaccattcaacaaagaaaaggagagaaggaaaattgagattcaagaggtgaatgaaggcaaggaggagcctggaagacctgcaggggaggtctccatgggatgccttgcttctgagaagggaggcaaaagcagcaggtcaccagaagaccctgagaaacttccgatagccaagcctaataatgcctatgaatttggtcagattataaatgctctcagtaccaggaaggataaagaagcctgtgcacatcttttagccatcactgcaccaaaagatttgccgatgtttttaagtaacaaacttgaaggggatacattccttctcctcattcagtctctgaaaaataatcttattgaaaaagatccctcattggtgtatcagcatcttttatacctgagtaaagcagaaaggtttaagatgatgttgacactaattagcaagggccaaaaggagctaattgaacagctgtttgaggacctttcggacacaccaaacaaccattttactttagaagatatacaggccctaaaaaggcagtatgagctttaaatcaagataattgttagatttcttccatgcatgtatgtgttccaggaatgttaatgagatggtattgtaaaagagttgcatggataaaacttggcctagaaaagtttggtctgcactataaaacattttacttattttcctacatagaacatgtatattctacaatctgctttttattagttgtaaatattttcttatgtaccagaaccaaataagtatatttagaacttgttaaaaatacattttaatttatgatatacatattattttaattacttgttaaaattttgagttaagttgcatttctttgggctatgaaggagtcctcttaagtttgatagaaatgaatttcttgtaacattcttttttaaaagtggaagtcattaacagtgattattatatcacttatatcctgctaagatacacataaatcccattttgtactagtacctgtggattacagtcagttaaaatgaaatgcaacactgaagtctataacatgaaatgattattaaattgtttattaatttagagctataagaggaacttattttttctaatacggaagcattgcctaataattaagaacaaaaattgccaaaaatttctaccactttttactagattttaaaaagctactttcttttatattgcctatataagcaaaaaaccaaccactgtattaaagcaaactaagcctgcatttatatctgaattattacctccatattttaccaaacatttgaatgtcccccttccccctttttngttttctgcttttatgactgtatttattcctttactgtaaaagaatatgaagaactcntacatgt

SEQ ID NO: 311 - DNA, 2501 bp, Homo sapiens
  misc_feature: Incyte ID No: 481848.1c
cccggggggaaaacgggggcccgccctttgatgagcgccccgggggttctccactttggaagaaaccgggatatttttcgggggggggaaacccgttgttggggaaatctgggttttggcaccgtaaaggaaatgggagcgcgcttaaggctcttggggggggaggtacccccaggggaaaggggggctttttaaaggcggggaccggcggggtggccaaaccctgctttaaaaatttggtgataaacctgttaccgggttttggtaggcccaggggaaaccgggggcaccgagggtcattttcggggggaaaaaacttattggtaacatggcaggattccgtttaacagaattaggtgggtattgattgtaaaaggtctatcaactcttgctcttatttggtgactttgggactttttgaccctgggtttaaaaaggggggtaatttctttccctaaaatatttctaccaatggggataattcggggaaccatggggggaaagtaattcccacttaatggggtggcacttaagggatttgccgggtaaaattaaatccaatttaatcgttgaaaaggcagggttagacccccttaaaaacaccgttagttgcctaccataatttgagcactttttcatgaaaaaaaaaaaaaaccattcagtttcctacagattttgcacagttcattccatggagatacttttagggaaatagggaagagggttgtgaaatgtagcctcccctcattcctcctctgtgcagcccagcagctctgaccgcaatgtgatcctcccgtaccaggaccaaggaaggattcttatgtgtcgtgcatagatgggagggtcgatgacattttttctgtgagtgtcattgtcaaaatttccctggaaaaccttatcttttctttgcttttcatcctggtatacagtccagtgttctccatcattgctgtaagccagtttgtaggagccaacaaactgtacatgaccaaaatctttagctccttgtgtaatgatgccagtcactttggttggaacaagaagatccacctgtaaccattgtgactggtcattgtggccagaggtccaggcattcactttgccttgcttgtccagccgagctttccttggttcccaagtgaacatgtccatgttgagcgttctgaagatgctggaggcagtgatctgatagtcttgtatatgtcctgatttcatacccagaggctcagaacaacccgacagttcacagccaagaagttccattcgcaaagtgcaatgtcttcgacaaacttggggatagagtcttacatactgagcttttatggggggtgtgaaagagttagcatatggagtgttgttatcaatgtttccacgaaacaccatgtcttcattggtgcctttcactttgtacattgcccaagtctttccatcattactgtaggcaattttgtaggattttatatactctgggcttccaatcctcttggctccttgggtaatcacaccagtaactctcattttcctttgcaaatttatctgaatccacggccatctgtcattttctgcagctgtccacgcatttataagccccttcttattaagacgtgcatagtagggataccatttttggagtccaaaaagagctcggtgagtagaggaagctgtgatttgctggtttgatataattccaccttcaattcccagtgggcctgagcatttgtattgacaatttcttcccataaattcgcctgggcactcacaggaatagttagcaacaagatctgtacatattccaccatttttgcaaggctcaacttcgcattcatttatgttgtgctgacagtgaatcccattaaatcctcggggacatttacaaacatagcctatgaatgtatcccctcggtatgcttcacttatttcacaggttcctccattatggcatggattaggagtgcagggacctgctgaagttggttcttcttcatctgatgcaacctccacaacactagaacagttggggtctgtgaagccatctggacactcacaggaaaaggaaccatcagccaatcctggcaaacagatacctccattttcacatggattgggatcacaaatatcacctttgccgaactgggggacaccgaggctgagcccgaccaagagccagacggctaccgagcgcttcatgatcccgtctcccggacgtgaccccggctggtcaggggtcgtcgcggagggcagtgtagccgaggtggcagcgcagggcagcagcagactccgcccctactaaagaattcaagaagacgttctctttcctcagcgctttgttaaacaaattcttggagagggcgagagtggtgactaaagagaggagcctttcctccccttttgcctgcgctccggcgcgcggaggtgggtgagctccggggagccgccggcgggctcagccctccgctgcgggtgggtcccggcagaggcgcggcgggcggggcgcgggctcc

SEQ ID NO: 312 - DNA, 210 bp, Homo sapiens
  misc_feature: Incyte ID No: 208723.1
taaattgaccatcttataccaggaagtcaaatgagaagacatcagtaaaaatattctggccaactcatgttttatttatcatatcttcatcattaattgcttctcataatgccacagtttgtcatggtatttgtggcagcaggcaaagtccttgttcagactttgattaaattgctgtggcatttttctattaaaaagatctcctgtttc

SEQ ID NO: 313 - DNA, 2071 bp, Homo sapiens
  misc_feature: Incyte ID No: 064612.1
  unsure 1300-1589: a, t, c, g, or other
gtcaagctctacctgagcgacaaccacctcaatagcctgcctccggagctggggcagctacagaacctgcagattctggccttggatttcaacaacttcaaggctctgccccaggtggtgtgcaccttgaaacagctctgcatcctctacctgggcaacaacaaactctgcgacctccccagtgagctgagcctgctccagaacctcaggaccctgtggatcgaggccaactgcctcacccagctgccggatgtggtctgtgagctgagtctccttaagactctgcatgccggctccaacgccctgcgtttgctgccaggccagctccggcgcctccaggagctgaggaccatctggctctcgggcaacggctaactgactttcccactgtgctgcttcacatgcccttcctggaggtgattgatgtggactggaacagcatccgttacttccccagcctggcgcacctgtcaagtctgaagctggtcatctatgaccacaatccttgcaggaacgcacccaaggtggccaaaggtgtgcgccgtgtggggagatgggcagaggagacgccagagcccgaccctagaaaagccaggcgctatgcgttggtcagagaggaaagccaggagctacaggcaccagtccctctacttcctcctaccaactcctgaggagcttcagttgcaagtcaatgccaaggacccaactgcagcatgttctggaagcctctccattggagtggaaaggatggctctgggtcatttgggagtggctctgctagtagagactgatggagagagccaggtggaatgccataaatcacactgagaaaatatttctggcaaacagctcctcttccagaggggagttgtgtgccaatgatggcatgacaatccagagatcataacttctttgcaagaaaacagcttctccacacatgtattttgaaacactgaagagcaaaaggggctgggacactctgaactcctgcactctccagaagtgactggtcatgaggctcatgagctcctcaaataaggtatttgccatagaactaaatattctggtggtctgtctctttgcaggacatattttctttactgtaaatgaccataaacagtatcaatgtatcactgaggccaccgaaaaggacatttctacctaggcaatcagtcagattcacagaaaaaagttgtttgttgttgtaaaggctcaagatgaaactctttccccagcagtttagtgcctgctgaaaagatccctgatggacaatacttcttggtggactccagctgccccnnnnnnnnnnnnnnnnnnnnnnnnnnnnnnnnnnnnnnnnnnnnnnnnnnnnnnnnnnnnnnnnnnnnnnnnnnnnnnnnnnnnnnnnnnnnnnnnnnnnnnnnnnnnnnnnnnnnnnnnnnnnnnnnnnnnnnnnnnnnnnnnnnnnnnnnnnnnnnnnnnnnnnnnnnnnnnnnnnnnnnnnnnnnnnnnnnnnnnnnnnnnnnnnnnnnnnnnnnnnnnnnnnnnnnnnnnnnnnnnnnnnnnnnnnnnnnnnnnnnnnnnnnnnnnnnnnnnnnnnnnnnnnnnnnttcagctgtcaccttaaacttgacagtggctcatgctgatttagttcattttccctaaaaggtttgtcccaagatctgctcccaacagttgactgtcactgacaatgttggaagtcatctggaaaagagaacctctgtggtaatgtggtctcattaaagtcaagccttgttgtgattcctgtctacctccctgaagcaaagcccttctgtttattcacactaatgagccagagctgagctaaattgaatccctgtccttggaggaaaaccacatttccagaagcatgttagtttaaaggtagtaggtgagaaatgtgttctcttgaaacaagcactttgaaatttgaataggaagttgtagtgtatataggaagtctccgcctctttcgcctagtatctctgcctttgtttcaatttgttttgatttttacagactgttttgacaatgtataaaccaaggtattttgttttttggaagtatg

SEQ ID NO: 314 - DNA, 3203 bp, Homo sapiens
  misc_feature: Incyte ID No: 978402.1
  unsure 25, 61, 83, 139, 477-550, 2289-2584: a, t, c, g, or other
gcccgcgccgccgattgggggcgcnctgctcttcgccttgcgctaccgtgtgacaggtcangagttctgggacaacaacggcngccgtgactatgctctacgtgggcccgagcacccgggcagtggcggagctccgganccgcagggctggatccactttatctgagacgaggcgcctgcggccgacggcggaaaacaccaaaggcacccgggggcggggcgacccgatgttgcggggaggagtaggagagaccaggattggcgggagcggtccaagggagtcaagccggggagggcgaaaaggactttcagcctccatgctctgagacaactgtggaagggatggaaaccctattttcttttctccaagaccatggttggtctgcttccctcactcgggctccttgacagtcttctagaagagagaaggaggaaaagaagcagttcctgatgttacaaatgaacaaggatctcccnnnnnnnnnnnnnnnnnnnnnnnnnnnnnnnnnnnnnnnnnnnnnnnnnnnnnnnnnnnnnnnnnnnnnnnnnngattgtgaacccagggaatctccagagcctctgtgtaaccatgatgttatatttttttttcctctttaaaaacaaaatttaaaaccttgctataatctcttattaggaaatgatcatagtttctgactgtgctctgccttcccatcctgccaatctcctggactggcttggagaagacagggggcccccgagcttcatctgtgactcgaaggagtttgctgctgtctcctgtgtcagtgtcccatctatgcaggatcagcacaggacccccctcaccttcccacttacactctagcctttccatacattggaattctctcctggccctagccagcgctccacacctgttggtgtgccacctccctccctcttcccccactggccttgaacaggcaaaccccctaatgtcgccactaggttgggtccgtgactaggaaacctgctagagggtctgtgcttgggccttttctaggaatcccgatgttactgggtaagtgccaactctgtgggcagaatgctaatgataatcctgttccctgacctctttctcagaagtaccctggctcactctccccaatctcagctttatagaacaacattttggtcttgattattcccatatcaagctgccccagggcttcggtaagctgttagttgccccactgcctcaaggctgggtctggctgagctacttcttaggcacacaaatagtgggtgtctccttggaacctgacacaaaactatcagtgctaccaagccttgtaaaatagggaggaaactaatatttcttgagtggcttctgagtgcctggtgctttcgcggctctctggagagattccttgccctgatggctttggtgtgtactcctctcccaggacttcagcactgagattttcccaaccccctggcttttcctcaccttgggttgagttgatccggcactaccacaaaccccaccatctgcaaaccaaccaagattaggcagtatgccctttccgtcttgcactgctcttccaaaacttccatctgtatttctcacaccctcagtaagcaaagctgagtgtgcatggacagagctgcatccactgctttctcccagcgggtgcagtctaatctgacacggggaacactaggagtttagcggaatcttcagccaccctattaatgtgttacgcattaggcattgtagtggaaactcctctgatggctcatgactatatgaacaggagcaatttggaatataacatgtcagctgtggactgggaagtgccgtgagagaaaacactacctgggtcataggcttgggtccctgaggcaacccagcagggacactgttgcccattcctctcatccagactgcaggtgtcttcctacacctccctgtcccatagcctccgtcctgttttttgtttgttgtgtttctttgtgaatgtagaaaaacatttcatcatgagccctagctcctcagttttccacctaacacccacattcccttgtttctaactgccgtgtttttctggagcctgctgggatctttgcagtttgcaggtcatagaatcagacatgaaaaggcttctcttccgacgtcattggttcctggctcctttacagatgagaacacaggtccagaggtgagaaatgactctagcagggtcatagaatttgttagtgcagctcaagatgggacttaaactcaggcctcctgatcacccattcccaggctaggaaacaggtctctnnnnnnnnnnnnnnnnnnnnnnnnnnnnnnnnnnnnnnnnnnnnnnnnnnnnnnnnnnnnnnnnnnnnnnnnnnnnnnnnnnnnnnnnnnnnnnnnnnnnnnnnnnnnnnnnnnnnnnnnnnnnnnnnnnnnnnnnnnnnnnnnnnnnnnnnnnnnnnnnnnnnnnnnnnnnnnnnnnnnnnnnnnnnnnnnnnnnnnnnnnnnnnnnnnnnnnnnnnnnnnnnnnnnnnnnnnnnnnnnnnnnnnnnnnnnnnnnnnnnnnnnnnnnnnnnnnnnnnnnnnnnnnnnnnnnnnnnggtctctacacaagcccgtgattcttcatggcaagggataacatcagaaatgtttcattttctgctattagtttccattcctttccccatccaggcataaagagaaacaaaagacaatgatggtattctctgtgtcctcagctttggcacttttgttgatgttgctaaggagcagtgaccttgctaaaaagactgaataatccacccactgaatagctaacctggggaggaaatgaaaatttcctttgtggatctccccaaatccattgttgtcaccaggccctcccagaacctcctcagttccttcacagtgcaaccctgtgtacttggcccgcaacccaatagtattgtgcctcacttcaccttccatgggcaactgccctcccttctggacataaaacctcatattttaaataaagttgaaatatgaaaagaaagtatgtcataagatattcagaagtattgtgtgttttgggctaagggcagcaagagactcagaggcaagattccctccttgactcaatttcttggtcaccttgttttttgtgtgtgtgtgtccagaaaaatttaataagtttgcttaaattattataaagttgaaccactgaaatgttcactg

SEQ ID NO: 315 - DNA, 984 bp, Homo sapiens
  misc_feature: Incyte ID No: 453369.8
ctccgagaggggaccctcttttccacacagccttctccacctctggattttggtaactgctccctcctcatcccttcaggattagtggcctcagtgggagtctggcttttactagtcctggcggacttgtggtttctacataatgtgctcgcacttttgcaaaaaatctttttatagaaccctcctcagataattctgagtgagtgtcatctatttccctgactggtacagtatctcttctgaaaaagcagagtgcattcaagtctgtaggaaaacccttttcttagggaggtgattttttttctctctctgcttcttatttggcctactttacaatttctaactaactagttattggcatttactgacagtaaattattgcagtcaccaataaatgatagtacattgtgaaacaaaatatttgctcatattagcaaataggacattctttggctttgaagtctttctttcttttgtgaagacttcacacacggttgcttcagcacacagttgctgctcaggttttatgtatagatgataataatagaaagcacagtttactaacatggtaaaccaacggagttcaagtcaagtcagttaataccctaagaattagattttatttcttattctgaaaacttgctacacagggacttatctaacccatagtgtgctctgttgctgacttgattcaagttgcagcgtgttttgcgctgactctaaggtgcggaaatcctcacacctggcaaaggagaattcaaactgaactttttgaatggtttaataaaaatagaaatcactggtaatttccaccccaaactaaactatttcccttcttttaaaaaaatacacaaccaagattttaatgtaaaatattttgctttaattgtattttatgccttgattaatgaaacatggaaatattgattttcagttttggtcacctgaggaacctatctttgtttgcttttggaaaagcccatt

SEQ ID NO: 316 - DNA, 286 bp, Homo sapiens
  misc_feature: Incyte ID No: 027240.1
gggacattttgggacaaagacacattgagttgatttttatttgtttttctgttccagaaacttcatcaagttacgggcctggtctaagaaaacacattgcaatctattttggcagacttctttcaaataaaatactaatttcattagctgatagtatagtaattggcaaacatttcctctttggaaataccaatttgggctagccattttgcagaaatttgtgtagttttgattataacctgttggagagcatttctaaattacttatacataaaagataatcttt

SEQ ID NO: 317 - DNA, 465 bp, Homo sapiens
  misc_feature: Incyte ID No: 401290.1c
acattcatgctcatgacatcacatgctgagaggacagggaggccagtgtggggctggcctcgaagagaggcggcatcagtgctaccattgagatgtccccacaaaagagtgtgtgacagccagatgtgcagcttaatggagactgaaccaggattgtgggtggaacattggcacatgctgcttatggcttgaatagcagctcttgaggaatctatatttctctacctcatgcagaatcttagagctctggctttgtggctccatggctgggggagggagtggagacggaggaacttgtcactgctccatgccccattgttgaaatggaaaatgtggaaatgttaagccgtttctagaggattgtggaaggtaagaattgcttccaaatataaaaatacaaatacaaaagatcacctgatcgtcacagttgggggctttcttgaatcaaaatggttatatctctac

SEQ ID NO: 318 - DNA, 376 bp, Homo sapiens
  misc_feature: Incyte ID No: 481847.1
  unsure 110: a, t, c, g, or other
atgaagcgctcggtagccgtctggctcttggtcgggctcagcctcggtgtcccccagttcggcaaaggtgatatttgtgatcccaatccatgtgaaaatggaggtatctntttgccaggattggctgatggttccttttcctgtgagtgtccagatggcttcacagaccccaactgttctagtgttgtggaggttggtccctgcactcctaatccatgccataatggaggaacctgtgaaataagtgaagcataccgaggggatacattcataggctatgtttgtaaatgtccccgaggatttaatgggattcactgtcagcacaacataaaatgaatgcgaagttgagccttgcaaaaatggtggaatatgtaca

SEQ ID NO: 319 - DNA, 2727 bp, Homo sapiens
  misc_feature: Incyte ID No: 235636.1
gtcatgaaaaagtgctcaaattatggtaggcaactaacggtgtttttaagggggtctaagcctgccttttcaatgatttaatttgattttattttatccgtcaaatctcttaagtaacaacacattaagtgtgaattacttttctctcattgtttcctgaattattcgcattggtagaaatatattagggaaagaaagtagccttctttttatagcaagagtaaaaaagtctcaaagtcatcaaataagagcaagagttgatagagcttttacaatcaatactcacctaattctgataaaaggaatactgcaatgttagcaataagtttttttcttctgtaatgactctacgttatcctgtttccctgtgcctaccaaacactgtcaatgtttattacaaaattttaaagaagaatatgtaacatgcagtactgatattataattctcattttactttcattatttctaataagagattatgtgacttctttttcttttagttctattctacattcttaatattgtatattacctgaataattcaatttttttctaattgaatttcctattagttgactaaaagaagtgtcatgtttactcatatatgtagaacatgactgcctatcagtagattgatctgtatttaatattcgttaattaaatctgcagttttatttttgaaggaagccataactatttaatttccaaataattgcttcataaagaatcccatactctcagtttgcacaaaagaacaaaaaatatatatgtctctttaaatttaaatcttcatttagatggtaattacatatccttatatttactttaaaaaatcggcttatttgtttattttataaaaaatttagcaaagaaatattaatatagtgctgcatagtttggccaagcatactcatcatttctttgttcagctccacatttcctgtgaaactaacatcttattgagatttgaaactggtggtagtttcccaggaaggcacaggtggagttatttgtgagaagcaaagtgtttactaatgacaaagtagtaaaccattttcaagatgaaaactgatttctatttattttgcttcaaaggtcctgaaaaaataagcaattatcataacaatttgttattgatactggaggtttcattgacatgtctctcaaattaaagctcacactgcctccataaaagtcttcaacatctaatttataagctttacaagtatttattttataaggcttagacagaattattggagttttaaattaagtgtattggaaaagaaaggatggtatgtgtatgaaatgttaagatcctacgcaacactgctatttttttcctttaatatttgtgctgcataacaaaagccactagactgttactgtcttgtctgtccatgtgttaacagcatttcttaatgatgtatatatggagtggtcttcaatcatagtgaagaatttaaagagaaagtcaattgtattggcatttttaataagaacaaaattagttcgtctaaggggactggctggccacatatttgttccttgcccatatgctttctacttcttgttcttattatgaaattatgaatttgaagcctctgaaatggtgatcagttttcaacatctttcaaaaacaaaattactatttcctccatattgccttttttagataactttaaagttaggattttaaaatatttgtaactggctaaattttaaagtcgtgacaaataattacttaggttcagaaatatacacacacttactctttagccagtttctttcaaggtttactgtcccatcagatatctagccattttcctttgcaaattacataccttcttaagagtgtatttttaagattattacttacgctttatgatgatatagtttttcaaaattatttatagcttcatatgatgttttgtaattttttctattgatacctgttttaaaaatattttccaaggaagttgattaaaattatatttgttaccttttagaaaaagcattgaaatgagtttctcttgctttttcattttccctctgctttatatgctcttcgcaatacatcatgtccaacgggatacctattgttctcatgacacccaaaattgatgagagcaaaggggtcgcaccatatggaaatgttgaaaactattgtaaagtagtattatgaagtagcttttgtgtcattcatgtcgatgacatgaaagtgaagtaaatttattctatgtaaattcacactaaaaccagtacagtaccataagtagaatacatgtaagaatcacctagtcttcactatattgagtaaatataacatgctaattttacaattaatgaaactaaacttttaaacatctccattatatctacatccttttgaaggtatttatcatagttgccaattttaattttaggattgactttctctttctgaatgacttcataaagtttggtgtgaattttgaagacttgggttactaatgattgtatctttgctagtcaacaacttatgaaatatactcaatgcgtctgatgtgtcattaagtgcagaaataactaagacacaaataacctttgcaaaccttcaagctgtgtaatattccaatgttgtttttttctttgtatatatacttatatcacgtaggatgtaaaaccagtatgaccttgtctagtctccaaacttaaaataaacttttgaaaagctgggaaaaaaa

SEQ ID NO: 320 - DNA, 1193 bp, Homo sapiens
  misc_feature: Incyte ID No: 994057.7
  unsure 25: a, t, c, g, or other
caactctaacaagtaccaggtgatnctgatgccggtggtctgggaagcacactttgaaaactactcaaggaaacaagaaatggttttcctttagcagtcagcctgttcaagccttagatactccttaggctcttaagaaaagagcttatttcaaatgcattccctccaattgttaatgcttgtttgaaatggatactttctatgggcagaatcagtaccactttgctattggatttctcatggggatgcagctggtctcacataaaaggttaaaatagcagttagttgttgctgttacagcttcatctgtgccttaacttctagatctttgcaacggtggctttgaactcccacatttaactctttgacactggaaagtgtcattatatcctctaggcttaggatcagattccatttcctgtgtacccaagtaggctgataactgaattctttgtaaaatactcaagacttggcagaagtcacaattaagattttgaagttgtttggcgattaatgttgctgtgttattttgacatagtgatcttaagacagctctttgaagcttttagaacatctattgtatgcttttcctagcatacagacagtctcccccaaccccatccccaccccgctctgcattctacaagtaatgtgtgtcctctgcccacagggggtgctgcagaatgtgaggtttgtctttggaaccacaccagaagacatcctcaggaacaaaggctgctccagctgtgagtacccctctatttttagggcacatagggaatcagggggaattccaccaaaaacaaactgaggaatttagcaatagtggttatacataaattacccccagtgagatcatcaagaggcatacagaagtgactccaaggggtattatacacacacacgtatacacacgtgcgcatacacgcaacccctctacctgcatccttcacaccaaatgaaacgtcttctaccactaagaactcaagaggctggttggtaagagtatctatttgaagttttcattttgtttcttgccagctaccagtgtcctcctcacccttgacaacaacgtggtgaatggttccagccctgccatccgcactaactacattggccacaagacaaaggacttgcaagccatctgcggcatctcctgtgatgagctgtccagcatggtcctggaactcagg

SEQ ID NO: 321 - DNA, 695 bp, Homo sapiens
  misc_feature: Incyte ID No: 405559.1
  unsure 260: a, t, c, g, or other
tccaggctggccaagaggatgtgaaactcccagagggccctgtgcatgagggagccggcctcaaagggcacctgccgaagctgcagatgcccagtttcaaggtacccaaagtggacctcaagggtccccagatagacgttaatgtccccaagctggacctgaaaggccccaaggtggaggtgacgtcccccaacctggacgtgtctctgcccagcatggaggtggacatccaagccccaggagccaagctggacagtacncggctggagggggacctgtccctggctgacaaggacgtgactgccaaagacagcaagttcaaaatgcccaagttcaagatgccatcctttgggatgttgtccccaggcaagtccatcgaggtctcggtggatgtgtctgcgccaaagatggaggccgacatgagcattccctccatgcagggggacctcaagaccactgacctccgcattcaggccccttccgccgacctggaggtccaggctggccaggtggacttgaaacttccagaaggccacatgcctgaggtagccggcctcaaagggcacctgcccaaggtggagatgcccagtttcaaagatgcccaaagtggacctcaagggcccccaggtggacgtcaagggccccaagctggacctgaaaggcccaaaagcagaggtgatggcccccgatgtgga

SEQ ID NO: 322 - DNA, 888 bp, Homo sapiens
  misc_feature: Incyte ID No: 016760.1
agggggacctgtccctggcccacgaggatgtagctgggaaagacagtaagtttcaaggaccaaaactgagcacgtctggttttgaatggtcgtcaaagaaagtttccatgtcttcctctgaaatcgaaggaaatgttacattccatgagaagacttccgcatttcccattgtggaatctgttgttcatgaaggtgatcttcatgatccatctcgcgatggtaacttggggcttgctgttggagaagttggaatggattcgaagtttaagaaactgcattttaaagtgcccaaagtttcattttcttctaccaaaactcctaaagatagtttagtcccaggtgcaaagtctagcataggtctttccacgattcctttatcatcttcagaatgctcaagttttgaattacaacaggtttcggcttgttcagagccatccatgcagatgcctaaggtgggttttgctgggtttccatcatcccggcttgatctcactggtcctcactttgaatcttctattctctctccctgtgaggatgttacacttacaaaataccaggtgactgttcccagagctgccttggcccctgagcttgctctggaaattccttctgggtctcaggctgatattcctcttcccaagacagagtgctccactgacctgcagcctccagagggagttccaacatctcaagctgagagtcactctggcccactgaattccatgattcctgtttctcttggtcaggtatcttttcctaaattctataaaccaaagtttgtgttttcagtcccccaaatggcagttcctgagggagacctacatgcagcagtgggtgccccagtcatgtctcctcttagccctggagaaagagtgcagtgccccttgc

SEQ ID NO: 323 - DNA, 1112 bp, Homo sapiens
  misc_feature: Incyte ID No: 198522.1
ttccagtattctatttaagtacctactacatactgctctagtttcttagtactctgtaatgtgtatcttaattgctactggttggcattgtaactcataggaattccagaaaattattaatccgtgctgcttgcagttcattcatatggcccctcttaaccatgctggtgttatgattcagtattaactctcaattagcatgcccctgttcttcctaacttgtaaaatttcacataaatatattttcaattgtgtacaaattaagggtgtacaaattataataatgcatctctatcttcatactttgaatggcaaacgctatttatgcataaatattttcattttaagtaatatatgaagtgtaaatactcgatatataagtatagattttaaagatatgggactttattttcacataagtcaatagatgtttctctagaacaaaatatttagtaaagctttataaattatattaaaaggaagcggggaaccatgtattttttaacatagaacagaagtgacttcattctttttagacatcagaaatgttaaagttgattcccaatatttgttgtacttttttgtagcaaatgttaaaaatcacgagttaccatgtatagaatgtggactgtcatgttgatatcattgtacagtgataagccatttttatctgtatacatttcaccaatttattaacaggttgaatatttgtttctttttagaacattttatttatactgtgaagactttgttataccttatttgctacaacatagatcatatcattgctactttgacttagcatttgcatcataaacataattatgatgtttttttcatgctcccttccaggggctcagtcacttgaagaaactgttgctaaccaagctcttgactctgtttcccttaatgatacaagtctctgtaccagcgctttatgttaattaccaaaactctcctgcatcagagcatgatatctataataggagatactgcaataaaatgattaggctgtaaaatttggagacacaatttttcattacaatgcaatttgcatgtgcacatgtgcgcacataactttatatgttagttctttttccaaactcccaact

SEQ ID NO: 324 - DNA, 667 bp, Homo sapiens
  misc_feature: Incyte ID No: 019366.1
taaacccactagctcagtcttttctccctatcctgaatggactcttgcagggaagtcccataaattgttgttttttttccagtcactcaggtaataagtcctttggtcactttaagttacagacattaattttagtaattaagatgtctgtgtcattagctatacattttctttaaagctaagctcagacttgtttaagtccacaatgggaaaggggtttgatggcagagactgctaggtgtctaccaaagattcttgctctttgaagatatgttgtcaagatgtggcaatccagccagggacatttccctactcccagcatctctgtgagaacatatgactaagtcgtaggcggtgaaatgtgggcataggaatccaggcttgccccataaacatttcttgcatgatcctccattctcttctcccagctgctggttggacggtcgtatccaggataagtttggaagccaccgaagatggcaaagattgtcagtctggttctttgaatgaccgtgaggactaagtcttcctttcagtaactccactctgcccctagctaattggactttatatgagcactttcttctcttcttcccccgactgtccatctgctcttccaccaaggtgttagtggagagttgaccttgtgtctgaggatctctgcctg

SEQ ID NO: 325 - DNA, 1061 bp, Homo sapiens
  misc_feature: Incyte ID No: 002679.7c
  unsure 331, 422, 430, 1012: a, t, c, g, or other
atcatcaaagtctttattccagtgattaaaaattactggactcccacaaactgtaatgaagtgccattgtgtgtctggacataaggttggaggaagtgttcttaggcccactgaagataccctgggccatttatgtcaaagcattgtggaccatgcaccatttaaaccagatggcaagtcccttgattaaagagctgagaatctgcactaatttgtctgttgtacatctctcaagagtactgtggggcacaaaggtgcttagtgagtgtgagctgatagacgggttaagcgctggggactttgcagtcagaccacaatttaaatctcagcnccattagttcctagtgccagtggccttgaacaaattatttgacctcttagtcttagtctccttatctataaattgaggggtggcaggaggnggggggangagaaggattggggtagcagcatttcccttgtaggattgaatgagcttatacatgcagatagctcactccagcttttggcccagagtaagtggtcactaaaggttagccacagctgtcagtaacaattccctctcttcctgcctgggtgttctcttccattacagacagagtgggaagctttggagctgacggatcaccagtgggcactagatgatgtcgaagaagagctcatggccaaagacctccacttcgaaggcatgttcaaaaaggaattacagacctctattttttgaagaccgagcagggattagctgtgtcaggaacttggagttgcacttaaccttgtaactttgtttggagctggcacctcttgaaataaaaaggaggatgcacgagctggcaggcatgcagcaaggcttgttcttgtctgggctgggttcccctttatgtttgaaactagaggaaataggagtatgctgggcaacttgttatttttaaaatgttgtaaatgttccttctggtgactctagtaatgaaagtcagagaaagggggaaacctcaggctactgataatatataanatcttggccaggcgcatggctcacgcctgtgatccccaggattttggga

SEQ ID NO: 326 - DNA, 557 bp, Homo sapiens
  misc_feature: Incyte ID No: 208276.1
  unsure 388, 504, 551: a, t, c, g, or other
ataagatcagcagcagcatggcactgggatattggggatgggtggtttgtcagaagttcagagtcctggcttttccccagatttactgaatcagaatgtgcattgcgagaaaacctgcgtaatacgggagctggtgtgtatgtgacagtgtgataagtcccttctgttttagagaagggactaagtgggcacgaatatggctgcaactccagagaatactactgaaattggaaagggaaagttggctcagatgaaacagaccaacttcagagcaacagggcagaagtgtagaaggaagaagggtcaaaccgtgtaagctagtgtagcagttttgtttctttaaaaattaaccaaaaaggaaattatctttctgcctacaacataaagnggttcttagagattgagactaattcttactaataaattctaaacaattatttacttaaattatcactttggttagcagttggatttgttaaaaaaaaaaacctctagatattaatntaatgtagtatattatcttaaatttagttacttaactcttattttanaaaatg

SEQ ID NO: 327 - DNA, 500 bp, Homo sapiens
  misc_feature: Incyte ID No: 021552.1
  unsure 437: a, t, c, g, or other
ttaaaatccaaaaaatttgagggagtacatgtctttgtccttgacctttagaaccctccaaacatagcttggtattgctgtttttaaaattttctggagcatttaggattcacttagaaacaagcctttagggagaaaaatttatctagcaccactcactctatttttttgcactgactacttctatttttccccctttcatttccctagacttttcaatgcttttttataaaggtgcttgagttctgtttctcaacagctccctcatttattgaatgattcacacagtcactggaatattataggctcttaataaaatttttgaatgattgaaagagagaaaagtattttacctgtgatatattgatatttaaataaactagaacacttaaaggaaaacattttgctggaatcaaatactctttggtgtacaatgnattataattttgttattaattgaattggttaccattgtttgaacatgcagttatcattctgtt

SEQ ID NO: 328 - DNA, 3778 bp, Homo sapiens
  misc_feature: Incyte ID No: 198087.1
  unsure 1083-1106: a, t, c, g, or other
ccagctctacgtgggcgtgctgggcagcaagctggggctgcaggtggtggagctgccggccgacgagagccttccggactgcgtcttcgtggaggacgtggccgtggtgtgcgaggagacggccctcatcacccgacccggggcgccgagccggaggaaggaggttgacatgatgaaagaagcattagaaaaacttcagctcaatatagtagagatgaaagatgaaaatgcaactttagatggcggagatgttttattcacaggcagagaattttttgtgggcctttccaaaaggacaaatccaacgaggtgctgaaatcttggctgatacttttaaggactatgcagtctccacagtgccagtggcagatgggttgcatttgaagagtttctgcagcatggctgggcctaacctgatcgcaattgggtctagtgaatctgcacagaaggcccttaagatcatgcaacagatgagtgaccaccgctacgacaaactcactgtgcctgatgacatagcagcaaactgtatatatctaaatatccccaacaaagggcacgtcttgctgcaccgaaccccggaagagtatccagaaagtgcaaaggtttatgagaaactgaaggaccatatgctgatccccgtgagcatgtctgaactggaaaaggtggatgggctgctcacctgctgctcagttttaattaacaagaaagtagactcctgagctgcagagtccccccgggtagccggcaagaccgcacaggcaaggccgatgactctgtgcccactcctgttgttttccttgacaatctactgggccactgtgctactaactcttgtttacaaaatttgattctaagttgaattgcttcattcaacactcccaccctccctcccctcgaggtggtacctaagctgtggatttgctaaatgaattaagcaacctagaagatacagagctaatgaattatcaaaatgtgattaatcccagtaaggaaacactcatttagtgtctgtatttttggtgtgaaaattatttagttgccagtatattctgaagaatgtcttcttgatcagtcagataagcnnnnnnnnnnnnnnnnnnnnnnnncatgaatcatgtttggttcctgtgaaagtccctggtccagggatcctcctcctttctcttttacttctgaattctgaaattcagttagttacttttgcctttcgctcttctatcacagccaccttgaccttgggtaaaacccaaggtctttccttctggctaccttcctgcaggtccaccctgtctgccattggtctcctctgcctctgactacatctgccaccaacaaccctcccctcacccctgccaggggcagacaggcttctcagcagaactgtgactgaaatcagagctgctgtctggggcagtgttaactacacagaggcacatcctgacagggtttgccccagagatctaaattccagaaggagggcaccacacctaggaaggtaaatccagtatcagaaggttgctaaaagattaaagatcaagaagcttggaaacatcccatgggtacaatgtcttagaaagtctttaagtcacataccatgaatttttgcttcattactgaccatatatgaccttggaggaactcttttttttttttccttctactcatttctgtttccacctaccctgactcaccgtatttccagtcttctacccctgcagttatcctagtccagcaaagtcatttctttcaaaagagacatcatgtctgaaaataattactggtagtctaatatgagccagagtaaacagctcctcatggtcaatgaacatgttcaggaagcgatcaccttgatgcttgaacccaaccccagacagtggacaattctactttgaaatatccgtgaatatttactgtgggatccaatttaaacttctttcttctctagcctttaaattacacaactttgaactgacacggatctcttacaaagaacaatgcggcactgaaggaagagatgattcctttactcaaacctgcaggaatcagcctattaacaggcaggggaaacggtactttccaatgaatggtaactgatccaggcacattatcacacttcctagtcatctccacctttcctgtattgcctgtggcttgttgtttaagattaagaatcaaagagattaagaagtatcacttcaagtcttgctctgctcacttctatgtttgcagtcaaattattccttatgttggtgacctaaagagaattactttcattcatttcatttcccccgtagcagatggaagtgagaaacctctgagaaaatgaaaacatccttaaccactatctttcccttttatttgattattttatgtcagaaatttgcaaaagtttttttctcctccttctcttccttgttgcttaactttttaattcatgccatatgcagatatccaattatgtgcatcctgtgaataaaccacgtcttggtcactgtcatattttgaaccatctcatcagagatgaataatatctttttaccagagagagaacgaatgttagccacatgcccaagttaacaaagaaaaaatgttctcaaggttgtccttttgggttaaatctggcccttccttggcaaaagcaaaaattctccctgtgagagctcaacatctcaaatacaaccacaggaaaaatggcccaatctgccagtttaggcttaccagcatataatttttaatatctttacttctatcatcccaaatcaaagaactcttctctattatgtttaatcaattgcaagcaaatagatttttctttgtaacaatttgttctgcagaaggctgtttttcacttttcctttcttttgcttctttctgtctttccttctcttttgtctggagaaatcacttagactctgtgtgcctcttctacattgcattctgctctgctatgttacctgctaggctggcttctttggactccctatatgattgatgatgtgaaaacctaaattacttgcagcatagtattacttctttgatgttctcattagcataatgttatttttgaaaaggaaagatactatcacataagttttcctcatctgttgtgatatacaccaatggataaactaacggaaactgctttttgacattaaaagacaggagaaattatatttaactaagtaaaagttaagtcagaattacttgggtgatgtgattcaatttagttaaaggatgatatagagaaaatacattatttagcattatttcttcagctataatgaattgctatagaaatcaggcagatctttctaatgtgtattgattggtcttttcagctactctgaacagattactaaggccatctcctcatctctaagggagaaaaatagtctgtagatgaataatgtaaggtaaagagttgcatgtcagtctttgtaattatttacactttaactttctccagaactcagacatgatttcaacatggtgttagatttgtgcattttattttcctgaccacctcattccagccaatgtatggttatccactctgtgtgccaaaaccaatcatgcctttcacggccctttagttcagagaagttctgcactgatttttagtctcttgatgtctcaatcttacatgtataccaatcacagtacaactcaacactttattccattgtgattggtatacatgtaagattgagacatcaagagactaaaaatcacaatggaataaagtgttgagttgtactgtgaaaaaaaaaaaaaaggg

SEQ ID NO: 329 - DNA, 7768 bp, Homo sapiens
  misc_feature: Incyte ID No: 903269.4
tttttacaatgcgcaatcttggcaaatttattcaaaccctttagacttcggtctctcacagtgcgacgccgggagcccatcacacgctgaggtctgtcagaggccccagaaacagcctcggaaatggaggaggcggggcctcaccccgaccacacccccttgcgttcaaagcctttccgcctatgggcccgcctcctcggcgcagtgtgcaactctaattggtcgtctcactaatccatctgagcacctcggcgccgactggatcaactgctgaactcgggttgcgcacttcccggcgctgggaacgcggagcggacgcagtctggccgccattgcgctgcggggaaagcggcctcttgtgtgagggcctgtggggtgcgtggcaggcgtttaaggccgggctgcgggaggcgtggtcgggtcgggccgagtgaccgaaggggttaggccgggcggggctggatgcactgtgtggcgggactgcaggccggggtccccggacgcctttctgctgcgcttcttgtgggcccgggcctgtggttagtgaatttttctatcccgccgctccccagattctccggatatggccggagtgtttccttatcgagggccgggtaacccggtgcctggccctctagccccgctaccggactacatgtcggaggagaagctgcaggagaaagctcgaaaatggcagcaattgcaggccaagcgctatgcagaaaagcggaagtttgggtttgtggatgcccagaaggaagacatgcccccagaacatgtcaggaagatcattcgagaccatggagacatgaccaacaggaagttccgccatgacaaaagggtttacttgggtgccctaaagtacatgccccacgcagtcctcaaactcctggagaacatgcctatgccttgggagcagattcgggatgtgcctgtgctgtaccacatcactggagccatttccttcgtcaatgagattccctgggtcattgaacctgtctacatctcccagtgggggtcaatgtggattatgatgcgccgagaaaaaagagataggaggcatttcaagaggatgcgttttcccccttttgatgatgaggagccgcccttggactatgctgacaacatcctaaatgttgagccactggaggccattcagctagagctggaccctgaggaggacgcccctgtgttggactggttctatgaccaccagccgttgagggacagcaggaagtatgtaaatggctccacttaccagcgctggcagttcacactacctatgatgtcgactctctaccgcctggctaatcagctcctgacagacttggtggatgacaactacttctacctgtttgatttgaaggccttctttacgtccaaggcactcaatatggccattcctggaggccccaaatttgaacctcttgttcgagacatcaacctacaggatgaagactggaatgaattcaatgatattaacaagattatcatccggcagcctatccgcactgagtacaagattgcttttccttacttgtacaacaatcttccacaccatgtccacctcacctggtaccatactcccaatgttgtattcatcaaaactgaggatcctgacttgccagctttctactttgaccctttgatcaacccaatctcccataggcactcagtcaagagccaggaaccattgccggatgatgatgaggaatttgagctcccggagtttgtggagcccttcctgaaggacacacccctctatacagacaatacagccaatggcattgccctgctctgggccccgcggcccttcaacctacgctctggtcgcacccgtcgggccctggacataccccttgtcaagaactggtatcgggagcattgtcctgccgggcagcctgtgaaagtgagggtctcctaccagaagctgcttaagtactatgtgctgaatgccctgaagcatcggccccctaaggctcaaaagaagaggtatttgttccgctccttcaaagccaccaaattctttcagtccacaaagctggactgggtggaggttgggctccaggtttgccgccagggctacaacatgctcaaccttctcattcaccgcaaaaacctcaactacctgcacctggactacaacttcaacctcaagcctgtgaaaacgctcaccaccaaggaaagaaagaaatctcgttttgggaatgctttccacctgtgtcgggaagttctgcgtttgactaagctggtggtggatagtcacgtgcagtatcggctgggcaatgtggatgccttccagctggcagatggattgcagtatatatttgcccatgttgggcagttgacgggcatgtatcgatacaaatacaagctgatgcgacagattcgcatgtgcaaggacctgaagcatctcatctattatcgtttcaacacgggccctgtagggaagggtcctggctgtggcttctgggctgccggttggcgagtctggctctttttcatgcgtggcattacccctttattagagcgatggcttggcaacctcctggcccggcagtttgaaggtcgacactcaaagggggtggcaaagacagtaacaaagcagcgagtggagtcacattttgaccttgagctgcgggcagctgtgatgcatgatattctggacatgatgcctgaggggatcaagcagaacaaggcccggacaatcctgcagcacctcagtgaagcctggcgctgctggaaagccaacattccctggaaggtccctgggctgccgacgcccatagagaatatgatccttcgatacgtgaaggccaaggctgactggtggaccaacactgcccactacaaccgagaacggatccgccgaggggccactgtggacaagactgtttgtaaaaagaatctgggccgcctcacccggctctatctgaaggcagaacaggagcggcagcacaactacctgaaggacgggccttacatcacagcggaggaagcagtggcagtatataccaccacagtgcattggttggaaagccgcaggttttcacccatcccattccccccactctcctataagcatgacaccaagttgctcatcttggcattggagcggctcaaggaagcttatagtgtgaagtctcggttgaaccagtctcagagggaggagctaggtctgatcgagcaggcctacgataacccccacgaggcgctgtcccgcatcaagcgtcacctcctcacacagagagccttcaaagaggtgggcattgagttcatggatctgtatagccacctcgttccagtatatgatgttgagcccctggagaagataactgatgcttacctggaccagtacctgtggtatgaagccgacaagcgccgcctgttcccaccctggattaagcctgcagacacagaaccacctccgctgcttgtttacaagtggtgtcaaggcatcaataacctgcaggacgtgtgggagacgagtgaaggcgagtgcaatgtcatgctggaatcccgctttgagaagatgtatgagaagatcgacttgactctgctcaacaggctgctgcgcctcatcgtggaccacaacatagccgactacatgacagccaagaacaacgtcgtcatcaactataaggacatgaaccatacgaattcatatgggatcatcagaggcctgcagtttgcctcattcatcgtgcagtattatggcctggtgatggatttgcttgtattgggattgcaccgggccagtgagatggctgggccccctcagatgccaaatgactttctcagtttccaggacatagccactgaggctgcccaccccatccgtctcttctgcagatacattgatcgcatccatatttttttcaggttcacagcagatgaggctcgggacctgattcaacgttacctgacagagcaccctgaccccaataatgaaaacatcgttggctataataacaagaagtgctggccccgagatgcccgcatgcgcctcatgaaacatgatgttaacttaggccgggcggtattctgggacatcaagaaccgcttgccacggtcagtgactacagttcagtgggagaacagcttcgtgtctgtgtacagtaaggacaaccccaacctgctgttcaacatgtgtggcttcgagtgccgcatcctgcctaagtgccgcaccagctatgaggagttcacccacaaggacggggtctggaacctgcagaatgaggttactaaggagcgcacagctcagtgtttcctgcgtgtggacgatgagtcaatgcagcgcttccacaaccgcgtgcgtcagattctcatggcctctgggtccaccaccttcaccaagattgtgaataagtggaatacagctctcattggccttatgacatactttcgggaggctgtggtgaacacccaagagctcttggacttactggtgaagtgtgagaacaaaatccagacacgtatcaagattggactcaactccaagatgccaagtcggttccccccggttgtgttctacacccctaaggagttgggtggactcggcatgctctcaatgggccatgtgctcatcccccaatccgacctcaggtggtccaaacagacagatgtaggtatcacacactttcgttcaggaatgagccatgaagaagaccagctcattcccaacttgtaccgctacatacagccatgggagagcgagttcattgattctcagcgggtctgggctgagtacgcactcaagaggcaagaggccattgctcagaacagacgcctgactttagaagacctagaagattcatgggatcgtggcattcctcgaatcaataccctcttccagaaggaccggcacacactggcttatgataagggctggcgtgtcagaactgactttaagcagtatcaggttttgaagcagaatccgttctggtggacacaccagcggcatgatgggaagctctggaacctgaacaactaccgtacagacatgatccaggccctgggcggtgtggaaggcattctggaacacacactctttaagggcacttacttccctacctgggaggggcttttctgggagaaggccagtggctttgaggaatctatgaagtggaagaagctaactaatgctcagcgatcaggactgaaccagattcccaatcgtagattcaccctctggtggtccccgaccattaatcgagccaatgtatatgtaggctttcaggtgcagctagacctgacgggtatcttcatgcacggcaagatccccacgctgaagatctctctcatccagatcttccgagctcacttgtggcagaagatccatgagagcattgttatggacttatgtcaggtgtttgaccaggaacttgatgcactggaaattgagacagtacaaaaggagacaatccatccccgaaagtcatataagatgaactcttcctgtgcagatatcctgctctttgcctcctataagtggaatgtctcccggccctcattgctggctgactccaaggatgtgatggacagcaccaccacccagaaatactggattgacatccagttgcgctggggggactatgattcccacgacattgagcgctacgcccgggccaagttcctggactacaccaccgacaacatgagtatctacccttcgcccacaggtgtactcatcgccattgacctggcctataacttgcacagtgcctatggaaactggttcccaggcagcaagcctctcatacaacaggccatggccaagatcatgaaggcaaaccctgccctgtatgtgttacgtgaacggatccgcaaggggctacagctctattcatctgaacccactgagccttatttgtcttctcagaactatggtgagctcttctccaaccagattatctggtttgtggatgacaccaacgtctacagagtgactattcacaagacctttgaagggaacttgacaaccaagcccatcaacggagccatcttcatcttcaacccacgcacagggcagctgttcctcaagataatccacacgtccgtgtggggcgggacagaagcgtttggggcagttggctaagtggaagacagctgaggaggtggccgccctgatccgatctctgcctgtggaggagcagcccaagcagatcattgtcaccaggaagggcatgctggacccactggaggtgcacttactggacttccccaatattgtcatcaaaggatcggagctccaactccctttccaggcgtgtctcaaggtggaaaaattcggggatctcatccttaaagccactgagccccagatggttctcttcaacctctatgacgactggctcaagactatttcatcttacacggccttctcccgtctcatcctgattctgcgtgccctacatgtgaacaacgatcgggcaaaagtgatcctgaagccagacaagactactattacagaaccacaccacatctggcccactctgactgacgaagaatggatcaaggtcgaggtgcagctcaaggatctgatcttggctgactacggcaagaaaaacaatgtgaacgtggcatcactgacacaatcagaaattcgagacatcatcctgggtatggagatctcggcaccgtcacagcagcggcagcagatcgctgagatcgagaagcagaccaaggaacaatcgcagctgacggcaacacagactcgcactgtcaacaagcatggcgatgagatcatcacctccaccaccagcaactatgagacccagactttctcatccaagactgagtggagggtcagggccatctctgctgccaacctgcacctaaggaccaatcacatctatgtttcatctgacgacatcaaggagactggctacacctacatccttcccaagaatgtgcttaagaagttcatctgcatatctgaccttcgggcccaaattgcaggatacctatatggggtgagcccaccagataacccccaggtgaaggagatccgctgcattgtgatggtgccgcagtggggcactcaccagaccgtgcacctgcctggccagctgccccagcatgagtacctcaaggagatggaacccttaggttggatccacactcagcccaatgagtccccgcagttatcaccccaggatgtcaccacccatgccaagatcatggctgacaacccatcttgggatggcgagaagaccattatcatcacatgcagcttcacgccaggctcctgtacactgacggcctacaagctgacccccagtggctacgaatggggccgccagaacacagacaagggcaacaaccccaagggctacctgccttcacactatgagagggtgcagatgctgctgtcggaccgtttccttggcttcttcatggtccctgcccagtcctcgtggaactacaacttcatgggtgttcggcatgaccccaacatgaaatatgagctacagctggcgaaccccaaagagttctaccacgaggtgcacaggccctctcacttcctcaactttgctctcctgcaggagggggaggtttactctgcggatcgggaggacctgtatgcctgaccgtttccctgcctcctgcttcagcctcccgaggccgaagcctcagcccctccagacaggccgctgacattcagcagtttggcctctttccctctgtctgtgcttgtgttgttgacctcctgatggcttgtcatcctgaataaaatataataataaattttgtataaataggaaat

SEQ ID NO: 330 - DNA, 1055 bp, Homo sapiens
  misc_feature: Incyte ID No: 351166.1
ggaaaagtgattcttggtgactgcttaatcaaatggatgaaaacaaagaatcagaagataagtgtgaaggaatcgtcttggatgaagtattcaggaaggaattactcatctccagaataattttttttttcctaaagaagttaagtaagcagtattttcaggtaatgaagaataagttaaaatcttgggcctcaacattgaacattttttatctctgatgttttgtaatgttacttgctatcattccagtattgatgaaaatactattgaatgggtttaacctgcagacttctgttgactcatactctcaagagtggtaggggtgtgtagatggagaaaatgtacctcaaacagtgccaacactcaagactgtgagtagagcaataattttatgtcagcactaacctcactttaaaagtgtgagaaaaaagtttgtttacaggagcagaaacaggtctgttgtttctgaagaaatgtgatgtaactgatgtaaccattgacaatctatgtgtgcctttatacatttcatctctgttttaaaatatttttatgacaatcatgtttaaaattatttttagattacaagtaagctgcatgttaaaaattgagctgtgtaaggtagaggaaaaatagtgaaaactttgggattttaatctgtgtgtgcgtgtttgtgtgtgagagagagtgagaaatgtagtgtttcattttgtatgcattaaactgtcttgccaaaactcagatctaagattgttaaatagatatttggggaatttttttttaatcactttaaatgaaaaacgtcagctttactgggcattctggaagcaaaatatattatgctgatggtaaagtgagaaccttaagagtatactcatgatggtggaaagtgtgatggaccaaaatgcataagctatatacttcctgtgagtagtaattttagttacaatggagtagaaaaatatggtccatttaaacttgtcttctacctcataacggccttgcaagatacttttgaagaagccaatgtctagagccttactttaagtaagttaaac

SEQ ID NO: 331 - DNA, 1429 bp, Homo sapiens
  misc_feature: Incyte ID No: 344713.3
  unsure 317, 322, 324-325, 327, 329-331, 333-334, 336, 338-339, 341, 343-347,350-351, 353-354: a, t, c, g, or other
ttaaatttaatttttgacaatcactttaacacacaacttaggtttatatggaaagagaactatgaccacttgtgaacaagtaactggtaagtaagatggaattatggcttctgtgtgatactctattgttaggcaagcacaagctccttataaaagccctcatatatgtaaatgcatcaaatatcatgtgactacttggtttcctaaggacagtttattattcctttatcccagtataattttgcatagtcatcactctctttgttatgggtatctatacttaaagaataaatatatatgagttatctaaaaaaaanaaganannanannnannangnnantnnnnntgnntnngtggttgccatggcaccagggacggtgactgtggttaagcaggtcaccgaggaggagcccagctccaaccacacggtcatgatccaggagacggtccagcaagcgtccgtggagcttgccgagcagcaccacctggtggtgtcctccgacgacgtggagggcattgagacggtgactgtctacacgcagggcggggaggcctcggagttcatcgtctacgtgcaggaggccatgcagcctgtggaggagcaggctgtggagcagccggcccaggaactctagaggacatgtggcatcggatggccacagggcggggctgccaggctctgcaggcacccagggtggggaggccacccttcctgccctacccgcagaatggtgctctcctttgccctccctgcccagcagcctgataggactctcctagtccaacttggggtgggcaaggcagtcagcatcaccagcaataccacaggaccctcaccccagcatagacacacaccccctgacccttaccatctgcttcctgaaagacttcagtgtcagctcccctacacacaccccacaccttcaccccttgcttcaagattcaaacagagactcccagtccccctcagcatcttccctgaatcacagccccagctccttgacccccatctaggtgccaaatgttcatctgcaaccgctatgcagtctggtgagagggagacagccatcacatagaaagtgaccgtacgggtttttaatcactgctgggtggggtgggggtagggggattgtcctggctttgtcgacaaagtcccacttccccgagtattaagggcccttggtatcaagtgaggtaaattcacccatcacagggtctcgccctaccatcctggaattatttcacttttaagataaatgcactatttcactgttcgcctcccattctaaggaggtgaggtggttggaatagtgcatttatcttaaaagtgaaataattccaggatggtagggcgagaccctgtgatgggtgaatttacctcacttgataccaagggcccttaatactcgggactagttctagatcgcg

SEQ ID NO: 332 - DNA, 435 bp, Homo sapiens
  misc_feature: Incyte ID No: 167920.1
attgtgtagagtttctgatttactaattttcttattgtgagcactatatttatcatctttgtaaatgatgatttcttttctgataggctgtggaacctaacatttacatctgattatctgccttccctattgactcagactgtgtattttttgtcttgatttttatattgtaaatatgtatattgcaggaaaagattgtatagccaaactttgaagtgtccaattactaaaagttgaggttttagtgggagaaatattgtaaaagattctggtattcctgtttgcaaatatagctttggtgaacagttttctcatgtgaaggaaaaattgcagaccacaaatttgtggcttctgtttccttatttctcaataacaagcttttacatctgcccctcccttaaaatgacatgaaattaaataaaactaccatttatg

SEQ ID NO: 333 - DNA, 2006 bp, Homo sapiens
  misc_feature: Incyte ID No: 433569.1
caaactcgaagttaatcattcccagctcaaagccttgtgcaagtgctctctgccttcacgcttgcttcctttgggagagaaccttcctcttcttgatcggggattcaggaaggagcccaggagcagaggaagtagagagagagacaacatgttacatctgcaccattcttgtttgtgtttcaggagctggctgccagcgatgctcgctgtactgctaagtttggcaccatcagcttccagcgacatttccgcctcccgaccgaacatccttcttctgatggcggacgaccttggcattggggacattggctgctatggcaacaacaccatgaggactccgaatattgaccgccttgcagaggacggcgtgaagctgacccaacacatctctgccgcatctttgtgcaccccaagcagagccgccttcctcacgggcagataccctgtgcgatcagggatggtttccagcattggttaccgtgttcttcagtggaccggagcatctggaggtcttccaacaaatgagacaacttttgcaaaaatactgaaagagaaaggctatgccactggactcattggaaaatggcatctgggtctcaactgtgagtcagccagtgatcattgccaccaccctctccatcatggctttgagcatttctacggaatgcctttctccttgatgggtgattgcagcccgctgggaactctcagagaagcgtgtcaacctggaacaaaaactcaacttcctcttccaagtcctggccttggttgccctcacactggtagcagggaagctcacacacctgatacccgtctcgtggatgccggtcatctggtcagccctttcggccgtcctcctcctcgcaagctcctattttgtgggtgctctgattgtccatgccgattgctttctgatgagaaaccacaccatcacagagcagcccatgtgcttccaaagaacgacaccccttattctgcaggaggttgcgtcctttctcaaaaggaataagcatgggcctttcctcctctttgtttcctttctacacgttcacatccctcttatcactatggagaacttcctcgggaagagtctccacgggctgtatggggacaacgtagaggagatggactggatggtaggacggatccttgacactttggacgtggagggtttgagcaacagcaccctcatttattttacgtcggatcacggcggttccctagagaatcaacttggaaacacccagtatggtggctggaatggaatttataaaggtgggaagggcatgggaggatgggaaggtgggatccgcgtgcccgggatcttccgctggcccggggtgctcccggccggccgagtgattggcgagcccacgagtctgatggacgtgttccccaccgtggtccggctggcgggcggcgaggtgccccaggacagagtgattgacggccaagaccttctgcccttgctcctggggacagcccaacactcagaccacgagttcctgatgcattattgtgagaggtttctgcacgcagccaggtggcatcaacgggacagaggaacaatgtggaaagtccactttgtgacgcctgtgttccagccagagggagccggtgcctgctatggaagaaaggtctgcccgtgctttggggaaaaagtagtccaccacgatccacctttgctctttgacctctcaagagacccttctgagacccacatcctcacaccagcctcagagcccgtgttctatcaggtgatggaacgagtccagcaggcggtgtgggaacaccagcggacactcagcccagttcctctgcagctggacaggctgggcaacatctggagaccgtggctgcagccctgctgtggcccgttccccctctgctggtgccttagggaagatgacccacaataaatgtctgcagtgaaaagctggagccccgattcctaaattttgtcactcaaattgacacaaaccagctggccatggtggttgtcatcc

SEQ ID NO: 334 - DNA, 752 bp, Homo sapiens
  misc_feature: Incyte ID No: 406365.1
gatctgggtatttgacttgtatattgctattaattggccattgtttctagtctctttcagtagacagagctaagaaatgtaaaaggaaatatttgaatgtatgtatatgtgatatattaagtacatttaaacatattaaattcatgagttcatactaatactttcaataagccacaattcccttttcatgttttcgaaggaaaaatatccattgtctatatacagtggacatagatagtaataatactgatcttgaaaagagcagtcttaaatagatcccattaatagttaaagataacatatcttagaattctagatattagagagattatctagagctgtaatctagatattttatagatctttgctgtgctgttttgaatttgtgttggagtagaacaatcagatgacaaaagctcatcccacatggaaaaatcaaagcattcattacagagagaattttgaaataaatgcatatataaaaaatatatatgcatatataatgcatatgtatatgcatataaaatatatatataaaatgggggttataaacaatgaaggaaatagtgatactatctatgtgggaacaatactagtatcctccctttggatgaatacagtagctacagatgcaattctggggactctgtttagcaatagcttaactattgcttggctacaagcatggataacttgttcaaagataatgaggagttgtaaatatttaaataaacaggatttgcaacataaaa

SEQ ID NO: 335 - DNA, 5107 bp, Homo sapiens
  misc_feature: Incyte ID No: 348121.9
  unsure 1272-1291: a, t, c, g, or other
gctccgcagcgctcggctggctgcagcggcaccgcgggttgcgacggccggggatgctccagcgggcgcgatggcccccgccatgcagccggcccgagatccaatttgcccagcggctggcgtccagcgagaagggcatccgggaccgagcggtgaagaagctgcgccagtacatcagcgtgaagacgcagagggagacaggaggtttcagtcaggaagaacttctgaaaatctggaaggggctcttctactgcatgtgggtgcaggatgaaccccttctacaggaagagctcgccaacaccattgcacagctagtccatgctgttaacaactcagcggctcaacacctgttcattcagaccttttggcaaaccatgaatcgagaatggaaaggaatagacaggctacgcctggacaaatactatatgctgattcgtctggtcctgaggcagtcctttgaagtcttgaagcgaaatggctgggaagaaagccgaatcaaggttttcttggatgtcctgatgaaggaggtcctgtgtcctgagagtcagtctcctaatggagtgagattccacttcattgatatttacctggatgaactctccaaagtcggggggaaggagcttttagcagatcagaatctcaagtttatcgatccattctgcaaaattgctgcgaagacgaaggaccacaccctggtacagaccatagctcggggtgtcttcgaagctatcgtagatcagtctccttttgtgcctgaagagacgatggaggatcagaagacaaaagtgggtgatggtgacctctctgctgaggagatacctgaaaatgaggtatccttgagaagagctgtcagtaaaaagaagacagcactgggcaaaaaccattccagaaaagatggactcagtgatgaaagaggaagagatgactgtggaacctttgaggacacagggccccttctccagtttgactataaggctgttgctgatcgactcctggaaatgaccagcaggaagaacacgccccacttcaacaggaagcgcctctccaaactcatcaagaaattccaagacctttctgaaggaagcagtatatctcaactcagttttgcggaggacatttctgctgatgaagatgaccaaatcctcagtcaaggaaagcataagaagaaaggaaataaacttttagagaaaactaacttggaaaaggagaaaggaagcagagtcttttgtgtagaggaagaggacagtgaaagcagtcttcaaaagagaagannnnnnnnnnnnnnnnnnnnccacctgcagcctgaaaatccaggcccagggggtgcagccccgtccctggaacagaaccggggcagggagcccgaggcctctgggctgaaagccctgaaggcacgtgtggccgagccaggtgcagaggccacgtccagcactggggaggagagtggctccgagcatcctccagccgtccccatgcacaataaaaggaaacggccacggaagaagagcccgagggcccacagggaaatgttggaatcagcagtgttgcccccagaggacatgtctcagagtggcccgagtggcagtcatcctcagggacctagagggtccccgacaggtggagcccaactcctaaaaaggaagcggaaacttggagttgtgcccgtcaatggcagtggcctgtccacgccggcctggcctccattgcagcaggaaggccctcccacaggccccgcagagggggcgaacagccacaccacgctgccccagcgcaggaggctgcagaaaaagaaggcagggcccggcagcctggagctctgtggcctgcccagccagaaaacagcaagtttgaaaaagaggaagaaaatgagagtgatgtcaaacttggtggagcacaacggggtgctggagtccgaagctgggcaaccccaggctctgggaagcagtgggacttgcagttccctgaagaagcagaagctgagggcagagagcgactttgtgaagtttgacacccccttcttaccaaagcccctgttcttcagaagagccaagagcagcactgccacccaccctccaggccctgccgtccagctaaacaagacaccatccagctccaagaaagtcacctttgggctgaacagaaacatgactgccgaattcaagaagacagacaagagtatcttggtcagtcccacgggcccttctcgagtggccttcgaccctgaacagaagcccctccacggggtgctgaagacccccaccagctcacctgccagctcacccctggtggccaagaagcccctgaccaccacaccaaggagaaggcccagggctatggatttcttctgaggagcagcagagtcccttgtaaaagactgcttttgtacagaatgcgctataaattatacctttaagaatgtggggccttttttatgattttgtaagttcccataagttgtgtgcacgaggttctgagagtgcccgcagcttgctgcgtcctggcccctgctgtagtggctggcgggcgtctggttgaatcttttgctacaaaccatgttgtgcgtttgagctctccaggattttacatttttgggtaacctcagtgattcccattggtgtaggaaatgagaccctctctgaagctgaggagagcacgttgatctgaactttaaatcaatcagtgctgctggcacaatgaaaggtggaactgcacttctgttgagctctcagttctgcggaatttggtactcattaccgtattcgccgtactaagttggtttctgttagtcttaacagtctgttttcttttaaaagcatgtagggcttcattgccatgttctgtgggtgtttggcaggttaccgatggggaagattcttgtcacagaatcagcaataccatagtttttctacatgtgctcagctgggggtgtggacaggtaggggtggggaaagaagaggctctgcgttctgggggctttttcttctcctccccctacccggtttccctccctgttttcctacctctacggcaagcccaaagtgtcttcccgggagcccagcgcagcccccggctcttacccaggaccccgccccgtgctgagccttctgctgaggtccttgcgtggagcacactcattcctccaagcccttgcgctcccgtttctctctctctccgtccacgttccagccgagtcactgcctgcctgaccggctccatggcagctccccatcttccctagaggctgcctgcgtatctggagcctgcgctccggctcagcgacctttcctctcaaatgcggaagcgtgcacttacagttcagaccgttctcctgtaagttcattacaaacacgggcggaaggcactcaggctttcgttggagaaacagaaataaggccttcttttgagcagcgattgctggatcattgatctgtttgaggaagtgtctgacctgggcctgagagctggagaaggtgcagattcaaagtgagcggctcctgaggagagccgccaaggctgctcgccttctccgtggcttccgcagctaccgtctgcacggtgagagggcacgggcacacggttcgggctggcgtgcagctctcccagccagccacgctctgctcaggcctggaagtgaaagccgcctccttcccgttatgccccccatacaggagcctcggtttttcagcaaaacgcggccagtccccttctccactgctgcctcccagcagagggccccaggatctccaaggtcccagctatggctttggacaacgtggcttcggcccctggggttgcagagcttgcattgggtttacctcggtctcattcattcatggagccaagggtggggtttcacctgcgaacatcagactgacttgctggcgtcaagagcagttgactcactgatgaaggccctggtgaggagaaagcactctgttcttcgcctactctgtaatcgttttgtcataatgagccatgaaaaaaagtaatgaacttgtgctgttaatcgtcactgtaatgagaagtcttacgtacaacatagctgtggtggctgcgtggtttaatggctgcattagataggatcctcacatcccattcagaaccaaaactgatacagtgaaacaattaaggtgagcaaatagttttaacttttcttttttttttaagtttcattcttcctagaatatttttctaacaatttttatttcagctttaaagatgggtcatatagccaaacgggccatataatccaacattgttgagatgtcttaggacatctaaggcaaaactggcacatttgttctgcagactattgcaggaatgttttttcctagcatttctatattatctgtccattctgaggaaccagtgaatgtcctataaatgcacctcctgtcaaaaccatgcctgagaggtcccggctgggagtgacagggtgcttcttagattctattggtccttctctcattctccgaacttactcctttttatgggtaagtcaactaggtttacagtcccttatttttaatgcctaagttttgacagcaggaagaaaacaattttttaaaaattctcattacatagacgcacaagaatatgtcacataaagaaaatgtgtttagaatactggttttctatttacgcatgatattttcctaagtaaaattgccaagtggacttggaagtccagaaaggaaaataatttaaattaatgctggtgatcttaacaatattttgtaaaatgatgcttcccccttctccatggtctagtcaattttgtacaattaggtatctgactttacaagtttgttatcctttctaatttttactgaactgaaagcacaaagaagactacacagaaaatctggaaacagttgcaggtgttgggaggaagatgaaatcgagctgtcttttaacttttgtatgtgttttatcagaatttgctggactatgctggcaaggactttgtttacgatcaaattgtactagtgtctgcagggtttgtcagtactcgtcaaagccaagtccaattaaaaaaaaaagtctttgccctccaataagcacctcatattggaaacatgcatctcaaatatgtgaactaagttag

SEQ ID NO: 336 - DNA, 603 bp, Homo sapiens
  misc_feature: Incyte ID No: 363585.1c
  unsure 309, 512: a, t, c, g, or other
tgacaaaaataatacatttttaaaaatgtacacatgtatcaaacatattattataaaaataaaaatatttattcagtgtaagaatttgtaatgatcacaaaatattcacagcttatatttaagtacagtttcaaatgcctagtgcaattaccgtttatatctgtattttaaacatgtatataataaatatttttcaggttcaacaatatatatcaatccaactggctcttataaatattagttaacatcaattggtaaattcatatatatatatacacacacgtgactcagtctgtatgcgtgtatgtntgtgtaaatgtaactgtatgtgtgtgtaaatgtaactggatgcatcctaatatttacccttacctacaagatttccaagactcatttattctctttaaatggtgtgccttgaaagatttaccaaataaaaccgcaatcgtggaatatatcaagatgttattaaattcatcttgtgcacataattgtttctttaaatttatgtntcttgcaaaacttgcggtaatgctcatgcacaaaataattttctaaataaaaaataaaaacattttctcagtcattaattcttaaaaagta

SEQ ID NO: 337 - DNA, 201 bp, Homo sapiens
  misc_feature: Incyte ID No: 408116.1
gctcgagacgagggtggggccttgatgatggagtgagtgcccttacaggaagacacaccagagagccctcccttcctccctctctgtgtgcatgcaccaaggaaaagccatgtgaggacacagcaagaagcaaccatctgcaacccaaggaaagagccctcacccagggtgtgaccctgcccacaccctgatctctgatat

SEQ ID NO: 338 - DNA, 574 bp, Homo sapiens
  misc_feature: Incyte ID No: 339737.1c
  unsure 16, 29: a, t, c, g, or other
cagatttttaaagtgncgctggacaaatnctccatttaaaaggcagactatgagttagttgatgcctctccagatgaactagttgtctaaaggttttatgacacacatcacattcaaatggcttttgaccagtatgaatgagatagtgcctagctaattttgatggtgtttcaaagtgcttaaaacaaatattgcaaacatatggcctgtttctaggtagtttgttggctaccacacactgttgaatctttagcatttttaaattgttttcagccatcatattcttcaatgatatactctgatgagctccatactgttcttaaattccacagatgtctcaataatatccaatgttgcctcaaggctgaaagcctgttgattttcttgtcttgactagtaccattaaaacgatgtgaggatttcacgaaagtaagcgaacaagaaatgaaagaccttggcggtattgaggcaggtccgaccctccctgggggtcgctccacttctcagtcgggtttctgaagtcctcctcacgcatctggagctggcgagggcccgggaggcacgcacctcaggc

SEQ ID NO: 339 - DNA, 735 bp, Homo sapiens
  misc_feature: Incyte ID No: 978146.1
aaatgcttatgtgctagcaagatacagtcaagacgcatgtcgagatcatagttaccttgtgtgttttctgttttaaatattaaaatgggatgtttagactcttagatgcagataaaagatgttctcagtgataaaatcaatagaggctaatatgtcccctgtgaaaaatagtagcacaaattaggcagtccaatatattctgaggaatgcacatcaggcagcatgtaaaggacttctaagatgtagataggaaagaatgaagatgaggaaagaagagaaaatctgatctagaaaacagagtatgagtcccccttcccgccccctcttgaagattataataagccttatgctaagtaggaaaatgaattcatccaataacatttgcattcctttcagtacttccagcgagctgttaaagatgaattgtgtcgtcagaataatttatatgttcagccgtatgcctgttatgaacttggctgtcttctattagacaaaccagaggtaagatcttatatatataatataatatatatttttaatgttgttcaacaaaaatgtggaagtgggcaagcacaaagcacccttcatttaaaacaaactgaacacagtgttcttcattttgttttccttggttttacttagaatgaatccaagaagttagtaatactaccttattatctttaaggaggtaatttcttccctagcattcaaattacagtcatacatctcttaatg

SEQ ID NO: 340 - DNA, 697 bp, Homo sapiens
  misc_feature: Incyte ID No: 186012.1
  unsure 33, 92, 362: a, t, c, g, or other
tggaagtgcagcccagccagcagcttgcttttntcaccctgccttgtcgcagccagcctgactcttacttatacatctgagaagtgccagtntctataattcacatggctccaaatcctcataagtggttcaggttatgttctcccaagaatcctccatgccacattccaccctggtggccagatggagatgggtctgtacatttcctgagcttaccaagtctctatctagagaatataatgctgaatgaatgtaatgcctctccctcacatgggaacactaaatatctacaaatggttctattggagccctcctcacttcagttttaggaatgaagggagtgcactactcctttgtcttgncagggagaagtttattccctatttcctaaaggtttcccatcaatggaatcttttatttctaatctcacatataatagaaagtgtagtggtctgtggatcagctttactatcttagaataaacttcatgtggatatatctagtacctttatttggaatgtgttggttcctatcacctcttgtcctcagtttcggtatgttatccaaagatcttagataactgaaaaactctaatttaactttctcttttatgcagatattcttattatatgtggtttcctgttttgtgtgtgctttatttctgtggagtattgcctacaaatcttgtcttcttttt

SEQ ID NO: 341 - DNA, 797 bp, Homo sapiens
  misc_feature: Incyte ID No: 405041.1
  unsure 257: a, t, c, g, or other
agcaaatatgtgaactgttgctaagaaaaggagcaaacatcaatgaaaagactaaagaattcttgactcctctgcacgtggcatctgagaaagctcataatgatgttgttgaagtagtggtgaaacatgaagcaaaggttaatgctctggataatcttggtcagacttctctacacagagctgcatattgtggtcatctacaaacctgccgcctactcctgagctatgggtgtgatcctaacattatatcccttcanggctttactgctttacagatgggaaatgaaaatgtacagcaactcctccaagagggtatctcattaggtaattcagaggcagacagacaattgctggaagctgcaaaggctggagatgtcgaaactgtaaaaaaactgtgtactgttcagagtgtcaactgcagagacattgaagggcgtcagtctacaccacttcattttgcagctgggtataacagagtgtccgtggtggaatatctgctacagcatggagctgatgtgcatgctaaagataaaggaggccttgtacctttgcacaatgcatgttcttatggacattatgaagttgcagaacttcttgttaaacatggagcagtagttaatgtagctgatttatggaaatttacacctttacatgaagcagcagcaaaaggaaaatatgaaatttgcaaacttctgctccagcatggtgcagaccctacaaaaaaaaacagggatggaaatactcctttggatcttgttaaagatggagatacagatattcaagatctgcttagggga

SEQ ID NO: 342 - DNA, 4435 bp, Homo sapiens
  misc_feature: Incyte ID No: 474266.2
  unsure 4369, 4374: a, t, c, g, or other
caagaagtggtatgtaacacccatgaaggcagagactttggtaggaaggttttcataggaaagatacaagcaaatcagtcaatataattttgggaatctacaaagctaattgataacacaaaaagcttccaacttgaggcaagggggaaatgttttccagaaggtaaattgttaatagagtccaatgagctatttcagatttatacaaaatctctttttttatgttttcagtaatgtctatgccttataaatacatatatatatgtatacatgtaatgacttttttatgttaacaagtggaagtattatgacataggactaaaaaagaaaaaacaagtaaagtaattttacttcttttctaaattagctggttataataatttagaagttgcagagtatttgttacaacacggagctgatgtgaatgcccaagacaaaggaggacttattcctttacataatgcagcatcttacgggcatgtagatgtagcagctctactaataaagtataatgcatgtgtcaatgccacggacaaatgggctttcacacctttgcacgaagcagcccaaaagggacgaacacagctttgtgctttgttgctagcccatggagctgacccgactcttaaaaatcaggaaggacaaacacctttagatttagtttcagcggatgatgtcagcgctcttctgacagcagccatgcccccatctgctctgccctcttgttacaagcctcaagtgctcaatggtgtgagaagcccaggagccactgcagatgctctctcttcaggtccatctagcccatcaagcctttctgcagccagcagtcttgacaacttatctgggagtttttcagaactgtcttcagtagttagttcaagtggaacagagggtgcttccagtttggagaaaaaggaggttccaggagtagattttagcataactcaattcgtaaggaatcttggacttgagcacctaatggatatatttgagagagaacagatcactttggatgtattagttgagatggggcacaaggagctgaaggagattggaatcaatgcttatggacataggcacaaactaattaaaggagtcgagagacttatctccggacaacaaggtcttaacccatatttaactttgaacacctctggtagtggaacaattcttatagatctgtctcctgatgataaagagtttcagtctgtggaggaagagatgcaaagtacagttcgagagcacagagatggaggtcatgcaggtggaatcttcaacagatacaatattctcaagattcagaaggtttgtaacaagaaactatgggaaagatacactcaccggagaaaagaagtttctgaagaaaaccacaaccatgccaatgaacgaatgctatttcatgggtctccttttgtgaatgcaattatccacaaaggctttgatgaaaggcatgcgtacataggtggtatgtttggagctggcatttattttgctgaaaactcttccaaaagcaatcaatatgtatatggaattggaggaggtactgggtgtccagttcacaaagacagatcttgttacatttgccacaggcagctgctcttttgccgggtaaccttgggaaagtctttcctgcagttcagtgcaatgaaaatggcacattctcctccaggtcatcactcagtcactggtaggcccagtgtaaatggcctagcattagctgaatatgttatttacagaggagaacaggcttatcctgagtatttaattacttaccagattatgaggcctgaaggtatggtcgatggataaatagttattttaagaaactaattccactgaacctaaaatcatcaaagcagcagtggcctctacgttttactcctttgctgaaaaaaaatcatcttgcccacaggcctgtggcaaaaggataaaaatgtgaacgaagtttaacattctgacttgataaagctttaataatgtacagtgttttctaaatatttcctgttttttcagcactttaacagatgccattccaggttaaactgggttgtctgtactaaattataaacagagttaacttgaaccttttatatgttatgcattgattctaacaaactgtaatgccctcaacagaactaattttactaatacaatactgtgttctttaaaacacagcatttacactgaatacaatttcatttgtaaaactgtaaataagagcttttgtactagcccagtatttatttacattgctttgtaatataaatctgttttagaactgcagcggtttacaaaattttttcatatgtattgttcatctatacttcatcttacatcgtcatgattgagtgatctttacatttgattccagaggctatgttcagttgttagttgggaaagattgagttatcagatttaatttgccgatgggagcctttatctgtcattagaaatctttctcatttaagaacttatgaatatgctgaagatttaatttgtgatacctttgtatgtatgagacacattccaaagagctctaactatgataggtcctgattactaaagaagcttctttactggcctcaatttctagctttcatgttggaaaattttctgcagtccttctgtgaaaattagagcaaagtgctcctgttttttagagaaactaaatcttgctgttgaacaattattgtgttcttttcatggaacataagtaggatgttacatttccagggtgggaagggtaatcctaaatcatttcccaatctattctaattaccttaaatctaaaggggaaaaaaaaaatcacaaacaggactgggtagttttttatcctaagtatattttttcctgttctttttacttggttttattgctgtatttatagccaatctatacatcatgggtaaacttaacccagaactataaaatgtagttgtctcagtcccctccaggcctcctgaatgggcaagtgcagtgaaacaggtgcttcttgctcctgggttttctctccatgatgttatgcccaattggaaatatgctgtcagtttgtgcaccatatggtgaccacgcctgtgctcagtttggcagctatagaaggaaatgctgtcccataaaatgccattcctattttctaatataaaactcttttccaggaagcatgcttaagcatcttgttacagagacatacatccattatggcttggcaatctcttttatttgttgactctagctcccttcaaagtcgaggaaagatctttactcacttaatgaggacattccccatcactgtctgtaccagttcacctttattttacgttttattcagtctgtaaattaactggccctttgcagtaacttgtacataaagtgctagaaaatcatgttccttgtcctgagtaagagttaatcagagtaaatgcatttctggagttgtttctgtgatgtaaattatgatcattatttaagaagtcaaatcctgatcttgaagtgctttttatacagctctctaataattacaaatatccgaaagtcatttcttggaacacaagtggagtatgccaaattttatatgaatttttcagattatctaagcttccaggttttataattagaagataatgagagaattaatggggtttatatttacattatctctcaactatgtagcccatattactcaccctatgagtgaatctggaattgcttttcatgtgaaatcattgtggtctatgagtttacaatactgcaaactgtgttattttatctaatccattgcttaatgagtgtgtttttccatgaatgaatataccgtggttcatatgttagcatggcagcattttcagatagctttttgtttgttgggaagttggggttttggggggagggggagtattagtacgttgcatgaaatagcttactttataatgatggaattgctttttcttttgtcttgtgatttttttttttgaagtgaaatttaactttttgtgcaagtagtactattatacccatcttcagtgtcttacttgtactgtatcacattccataccctcatttaattcttaataaaactgttcacttgtttttctgggtagcatggtaattactggaatagtataaatgtgttgaatggtctttgagaaaatgaattaagattacaataaaccacaattgcaggaaaacaatgtagttctgagtctaatagtgataaagaatgcagtttgaagtttgaaatattgaatattgtagctgtacttgctcattaaaatgaaagtagctgtgagatgctttcaacatttagtctattcagcacaactggtaaaccttaaagctcattcctgggaaattaatcttcttaacttataanaaggnatatatttttatttctgtgtcatatgaaaacattcttaataagtttccaaatctcaaagtt

SEQ ID NO: 343 - DNA, 866 bp, Homo sapiens
  misc_feature: Incyte ID No: 401530.2
  unsure 863: a, t, c, g, or other
gttgtgttcaaccgtgagtgacccttctgaggctgtcaaattactcagggcctggtaggaactaggaggatctgggggttgctgtagtcctggtgcatggttgttggtgatgtttagcagcgcaggtgtatattataaaagccacaacgcttatgtaatttttcatatccttcgggtacaccaggttccatgagccagatccgaattgaggctggagtgagtgcctgtgagccaggggtggccattctgccctaagttccatgcggacagccaggctgtgaagctgaatctagctgagattagactacacagacctctgagaccaatttcaactctgagacttgatgattcctccaaacagtcctccaaacagaacagatgagaaaaggaaaacaaagaaagttgataatgaattgaaccctgtctggaatgagattttggagtttgacttgaggggtataccactggacttttcatcttcccttgggattattgtgaaagattttgagacaattggacaaaataagtttcctacaggggacctaggagcagcctggaatcgtgtttgtccccagtcaggttgggattgctgttcctgcttagaggtcgggaagttgagaccgtgctgcgatctctagaggcagaaacagtgcaacatgtgatttatttctcagcctccaacacattttttccttccttcatgaaggaatttccaagttactcctcctccagaaatcatgtgggctgtgtctctgctgcatagaggaacaacttcgtatacgtgagctcccctgagtaagagtcagccggcaaagcccttactcactccagaggcatgcggcccttcacatttgcgccgtgcnaaa

SEQ ID NO: 344 - DNA, 607 bp, Homo sapiens
  misc_feature: Incyte ID No: 234729.11
caagagtcagtttggggtagagggcagggaggctggcgggcagggtcaaaagatctgtctggatgtgttaatggtagatgcttcccaaacggtatgtaacaaatgctctatcaaccttatctcttgcttttttacattaatctaatgttagaagcctgacaattgaaaactaattaaaaaaaggttaaaagcaagctcctagtgcctcgaaacagcaatgattaatattaaacccatgtcatattttacaaatcatcaagaaaaataaagtttaaccaggttcctaagtatataagtaaactgctaaagtcataatctagtatgcatagattgtaaacttttagaaattagaaacttgaaaacctacacttttgctttggtgattttacaggtttgtacaaacataattgagaaaaatgcaaacccagagtggaatcaggtcgtcaatcttcagatcaagtttccttcagtgtgtgaaaaaataaaactaacaatatatgactgggaccgtcttactaaaaatgatgtagttggaacaacatatctacacctctctaaaattgctgcctctggtggggaagtggaaggtaagtcactcaacagatct

SEQ ID NO: 345 - DNA, 2841 bp, Homo sapiens
  misc_feature: Incyte ID No: 195199.1
  unsure 1395-1416: a, t, c, g, or other
cgaacagtgtgtaaaggtattagaactgatatgtactcgtgagtcaggagcagtctttgaggctggtggtttgaattgtgtgcttaccttcattcgtgacagtggacatctagttcataaagacaccttgcactctgctatggctgtggtatcaagactctgtggcaaaatggagcctcaagattcttctttagaaatttgtgtagaatctctgtctagtttattaaagcatgaagatcatcaggtttcagatggagctctgcgatgctttgcatcactggctgaccgatttacccgtcgtggtgttgacccagctccattagccaagcatggattaactgaggagctgttatctcgaatggctgctgctggtggtactgtttcaggaccatcatcagcatgcaaaccaggtcgcagcaccacaggagctccatccaccactgcagattccaaattgagtaatcaggtgtcaacaattgtaagtctgctctcaacactttgcagaggctctccggtagtaacacatgatcttctgaggtcggagcttcccagattcaattgaaagtgcattgcagggtgatgaaagatgtgtgcttgatactatgcgtttgggttgaccttctcttggtgctattatttgaaggacgaaaagctttgccaaagtctagtgctggatctacaggcagaatcccaggactccggagattagatagttctggggagcgctcacatcggcagcttatagattgtattcgaagtaaagataccgatgcacttatagatgcaattgacacaggagcctttgaagtaaattttatggatgatgtaggtcagactctattaaactgggcctctgcttttggaactcaggaaatggtagaatttctttgtgagagaggtgcagatgttaatagaggtcaaaggtcatcatcattacattatgctgcatgttttggaagacctcaagtagcaaagactctgttacggcatggtgcaaatccagatctgagagatgaagatgggaaaactccattagataaagctcgagaaagggccatagtgaagtggtagctattcttcagtctccaggtgattggatgtgtccagttaataaaggagatgataagaaaaagaaagatacaaacaaagatgaagaagaatgtaatgagcccaaaggagatccggaaatggcacccatatacttgaaaaggttattgccagtgtttgcacaaacatttcagcaaactatgctgccttcaataaggaaagcaagtcttgctctaattcgaaaaatgattcatttttgctctgaagcactgttaaaagaagtttgtgattctgatgttggtcacaatttgcctacaatactagtggaaatcactgcaactgtcctgnnnnnnnnnnnnnnnnnnnnnngccacttgctggctttgcagatcataagggatttagtagataaaggtggtgatatatttttggatcagctagccagacttggtgtaattagcaaagtgtcaacgttggcaggtccttcctctgatgatgagaatgaagaggaatcaaaaccagaaaaagaagatgaaccacaggaagatgctaaagaattgcaacaaggtaaaccatatcattggagagactggtcaatcattaggggaagggactgcttatatatttggagtgatgcagcagccttggaattatctaatggcagtaatggatggttcagatttatcttggatggaaaacttgccaccatgtattcaagtggtagtccggaaggtggatctgacagttcagaaagccgaagtgaattcttagagaagttacaaagagctcgaggccaagtaaagccatctacttcaagtcaacctatactgtcagcaccaggacccactaaacttactgtaggaaattggtcactgacatgtttgaaagaaggagaaattgctattcataattcagatggtcagcaagctacaatattgaaagaagatttacctggttttgtatttgaatctaatagaggaaccaaacattcatttactgcagaaacttccctgggttcagaatttgtgactggctggactggcaaaagaggcagaaaactgaaatctaagttagaaaaaacaaagcaaaaggtacgaactatggctcgagatttatacgatgaccattttaaagctgttgaaagcatgcctcgtggagtagtggtaacactcagaaacatagcaactcagttagagtcatcttgggaacttcatacaaatagacaatgtattgagagtgagaacacttggagagatttaatgaagacagctttagaaaacctaattgtacttttgaaggatgaaaacacaatttcaccatatgaaatgtgtagccagtggcttggtacaagcacttcttactgtgttaaacaatagcatggatttggatatgaaaccagaatggtagtcaactggtagaaagaataaatgtttttaaaactgcctttagtgaaaatgaagatgatgaaagtcgaccagcagttgcgttaattcgaaagttaatagctgtactagaatctattgaacgtctacctctccatttgtatgatacaccaggatccacatataacctccagatacttacaaggagattacgatttcggttggaacgtgcacctggtgaaactgcattgattgacaggactggcagaatgttgaagatggaacctttggctacagttgaatctctggaacagtaccttttgaaaatggtagcaaaacagtggtatgattttgaccgatcttcatttgtttttgttcgaaaattaagagaaggacaaatttatatttcggc

SEQ ID NO: 346 - DNA, 515 bp, Homo sapiens
  misc_feature: Incyte ID No: 368731.1
attccgtgatctgaaagttcgttaattcaaggagaaaagatttctgaaaaccaagttactattaactcttttaccttcagccatgatctttccacctataaattaaagattatttttccctcagagtttggcatagtaaatatctcaaagagaataaaggacatctggttttcctgtgtagtgggatgaaaggtttccataagccaggccacttggccagtccacgtggtccagctggactagcggttaaaacagtgaaacacttctatacggccttcagggtgcacctgccagcctggctgcccgtccttgttacccccgccttttccaacagtgatgtaacggaaggactaattcatggcacaagagggatcttcaggacgccgggccagtgtcacactcagtgactgttctgagttcagttcttgagtggagctggttgtcaaatactttaaatatcaccctagcataactctctcagctgccacacattatatgcccaataaaatgaacct

SEQ ID NO: 347 - DNA, 3020 bp, Homo sapiens
  misc_feature: Incyte ID No: 372313.6
aagacatatcaagatttaaaacataaatagcttggaacaccctgaagagcaacatgggagaaactgagaaaagaattgaaacccatagaataagatgtctttccaagttgaagatgtttctgttggcaataacatgtgcatttgtatccaaaacactgtctggatcttatatgaattccatgctcacacaaatagagagacaattcaacatcccaacatctctagttggattcattaatggaagctttgagattggaaatcttttgttgattatatttgtgagttattttggaaccaaactgcatagacctataatgattggcattggatgtgtggttatgggcttaggctgtttcttaaaatcactacctcatttcctcatgaaccaatatgaatatgaatctacagtttcagtttcaggcaacttgtcctcaaacagtttcttgtgtatggaaaatggaacccagattttaagaccaacgcaggatccatcagagtgtacaaaggaagttaaatcattaatgtgggtgtacgtcctagtaggcaatattgtacgtggaatgggtgaaactcccatcctgcctttgggtatttcctatatagaagattttgccaaatttgaaaattctcctttatatattgggcttgtagaaacaggagctattattggtcctttgattggacttttgttggcatcattctgtgcaaatgtttatgttgacactggatttgtgaacacagatgatctgatcataactcccactgacactcgttgggtcggtgcatggtggtttggctttctgatttgtgcaggagttaacgtgctcactgccattccttttttctttttgcccaacacacttccaaaggaaggactagagactaatgctgacatcattaaaaatgaaaatgaagacaaacaaaaagaagaggtcaagaaggaaaaatatggaatcactaaagattttctacctttcatgaaaagtctttcctgcaatccaatttatatgcttttcatacttgtaagtgtgatacagttcaatgcattcgttaacatgatctccttcatgcctaaatacctagaacagcaatatggaatatcatcttcagatgcaatctttctaatgggtatttataacttacctccaatatgtattggatatataattggtggtttaattatgaagaagttcaagattactgtcaaacaagctgcccacataggatgttggttatccttacttgagtatcttctctattttttatcttttctcatgacttgtgaaaattcttcagttgttggaataaatacctcttatgaaggaattccacaagatttatatgtggaaaatgacatctttgctgattgcaatgtggattgcaactgtccatctaaaatatgggatcctgtgtgtggaaacaatggcttgtcatatctgtcagcttgtcttgctggttgtgagacatccattggaacgggaataaacatggtgttccaaaattgcagctgtattcaaacatcaggaaattcatctgcagttcttgggctgtgcgacaaaggacctgactgttccttgatgctccagtacttcctaatcttgtcagcgatgagcagtttcatttattctttggctgccatacctggatatatggttctcttgaggtgtatgaaatctgaagagaagtcccttggtgtgggattacatacattttgcacaagagtatttgctggcattcctgcacctatatattttggcgctttaatggattccacatgtttacactggggaactttgaaatgtggtgagtcaggggcatgcaggatatatgattccaccaccttcagatacatctacctcggattgccggcagcactaagaggatcaagctttgttccagccttaatcatcttaattcttttgaggaagtgtcatctacctggtgaaaatgcctcttcaggaacagagcttatagagacaaaagtcaaagggaaggaaaatgagtgcaaagatatataccaaaagtccacggttttgaaagatgatgaattgaaaactaaattgtaattgtcctattatattacttttttcagaattagagaacatgctgtacaacttaattgttttaaaaatcagtagagatataatagataactttttcttgtctttaagaacctaaaaaacctcttaactcaaaataataaaatgttcactaatgatatttctaaggtatcagtgacacttgagttttcctaggagggacatcaataacagccccctaaagaagattcttagagccagctttatttttatgttgaaacagcaatttcccttaattcatcgaagtaagggtgtacttcctacatctccttctactaatacttctaaaaattttctgttatgaaaacctatttaattccactaaatttgttctttaatattggaattattcagatgcctaaattctcattctgttatgtgaagatttaaatattttattcaagtttatcgcttccatgtgagagaagcctacatcttcttattctatttaggaatcgttctttaactcttcttattcattctaggcatgactcctatataatagattactcataaatataccctcctactttcaattttttcttttctttattactcatacatttgctcaatttgtacagaatactgacaaacataagcaggttattaaacatcatgaggcaaagattgttggattttctttcagtaattcaaatccagtgactaaaggtttttcgtactgacatgtgtctgaatcaaaggatgaaaggaccatattatcaagactccagttcttacaaggctgtttgtaatgtcagatattgtcaaagaaccactttctaagattcaggactctttagaccgatgtttatatcacccattgtctcctaaggtagtacacaaacactaattttcccaaaataatcttagactatagcttctgttatgaaacagaggttagtaaaggctaaggtacatatt

SEQ ID NO: 348 - DNA, 1167 bp, Homo sapiens
  misc_feature: Incyte ID No: 256871.20
tgctatggctggtttctctgcctcgggctgtagggcaggacggctaaggtgcgcgtgctcgctggttctaacccttctgttgggcgtttctgcggagaggcgggagtgcgctgagagtctgtgcggaggtccatgcacagactgctttgcctgttgttgctcttcggaggcggcgatccccgaaggcgagctgaaatacggctgcaggctacaatttgcagccgaccattaaggaagacgacgagcgggagaggtggcccaccctcatggagcgcttgtgctcggatggcttcgcatttccccattactacattaaaccgtatcatctgaagaggatccacagagctgtcttacgtggtaatctggagaaactgaagtaccttctgctcacgtattatgacgccaataagagagacaggaaggaaaggactgccctacatttggcctgtgccactggccaaccggaaatggtacatctcctggtgtccagaagatgtgagcttaacctctgcgaccgtgaagacaggacacctctgatcaaggctgtacaactgaggcaggaggcttgtgcaactcttctgctgcaaaatggcgccgatccaaatattacggatgtctttggaaggactgctctgcactacgctgtgtataatgaagatacatccatgatagaaaaacttctttcacatggtacaaatattgaagaatgcagcaaggtataggtcaaccaatgttattttcaaactatctgaaatgcatttattttaacattgacacatgtaagggtcaatttttcatatttggaagctcaaacattccttgaatgaaaatattttgaaatgccttaactgtctaagattttactttaaatattggaacttttaaagaagcattatagggaacagctttttttcatgcacttatggtaaataactataaaaacaaatgaattacaataaatttataattcatgacaactgaatttgggaaaggtaatagttaagtgtttttccactaaattactttttttctaatcagtgtgaagtgacacaggaaagtaaaattgtcccttataaataggctttattttaaatgtcaaagaaaattaaagaatttcacaataaatgtacatgttgttgctgttgacaagtgttgtatgtgaaggtg

SEQ ID NO: 349 - DNA, 881 bp, Homo sapiens
  misc_feature: Incyte ID No: 256871.16c
  unsure 62, 69, 169: a, t, c, g, or other
atggagaaaaatctgggacagtgtctcctcagaaacaatcggcccagaaggttatatttaanaagaaantttctcttttgaatattgccacaagaataacgggcggttggaaatctggaacagagtatcctgagaatctgcccaccttgaaggctacaattgaaaatanaaattctgttctgaatacagccaccaaaatgaaggatgtacaaacatccacaccagaacaagacttagaaatggcatcagagggagagcaaaagaggcttgaagaatatgaaaataaccagccacaggtgaaaaaccaaatacattctagggatgaccttgatgacataattcagtcatctcaaacagtctcagaggacggtgactcgctttgctgtaattgtaagaatgtcatattactcattgatcaacatgaaatgaagtgtaaagattgtgttcacctattgaaaattaaaaatacattttgtttatggaaaagattaataaaacttaaagataaccactgtgagcaacttagagtaaaaattcgaaaactgaaaaataaggctagtgtactacaaaagagaatatctgaaaaagaagaaataaaatcgcagttaaagcatgaaatacttgaattggaaaaagaactctgtagtttgaggtatgacctagttttaaataaatgtttgaactgtttgttttatattaaagacgtataaggagaagttttgtaattgcgaactttccttctaggatttaacagggaagaaagcttcttaatcttatggagtgtgaaattattggatataatatcacaagttcttaattgtgaatacttctctaataattaaatgcatattctttaaatcatagtttaatggctgatagaa

SEQ ID NO: 350 - DNA, 875 bp, Homo sapiens
  misc_feature: Incyte ID No: 022485.15
gcccgacgagccatggttgctgggagcgacgcggggcgggccctgggggtcctcagcgtggtctgcctgctgcactgctttggtttcatcagctgtttttcccaacaaatatatggtgttgtgtatgggaatgtaactttccatgtaccaagcaatgtgcctttaaaagaggtcctatggaaaaaacaaaaggataaagttgcagaactggaaaattctgaattcagagctttctcatcttttaaaaatagggtttatttagacactgtgtcaggtagcctcactatctacaacttaacatcatcagatgaagatgagtatgaaatggaatcgccaaatattactgataccatgaagttctttctttatgtgcttgagtctcttccatctcccacactaacttgtgcattgactaatggaagcattgaagtccaatgcatgataccagagcattacaacagccatcgaggacttataatgtactcatgggattgtcctatggagcaatgtaaacgtaactcaaccagtatatattttaagatggaaaatgatcttccacaaaaaatacagtgtactcttagcaatccattatttaatacaacatcatcaatcattttgacaacctgtatcccaagcagcggtcattcaagacacagatatgcacttatacccataccattagcagtaattacaacatgtattgtgctgtatatgaatgttctttaattgagaagacaatttcttcatttttaggtattctgaaatgtgacagaaaaccagacagaaccaactccaattgattggtaacagaagatgaagacaacagcataactaaattattttaaaaactaaaaagccatctgatttctcattga

SEQ ID NO: 351 - DNA, 1095 bp, Homo sapiens
  misc_feature: Incyte ID No: 022485.10
ggcggtgcttgaacttagggctgcttgtggctgggcactcgcgcagaggccggcccgacgagccatggttgctgggagcgacgcggggcgggccctgggggtcctcagcgtggtctgcctgctgcactgctttggtttcatcagctgtttttcccaacaaatatatggtgttgtgtatgggaatgtaactttccatgtaccaagcaatgtgcctttaaaagaggtcctatggaaaaaacaaaaggataaagttgcagaactggaaaattctgaattcagagctttctcatcttttaaaaatagggtttatttagacactgtgtcaggtagcctcactatctacaacttaacatcatcagatgaagatgagtatgaaatggaatcgccaaatattactgataccatgaagttctttctttatgtgcttgagtctcttccatctcccacactaacttgtgcattgactaatggaagcattgaagtccaatgcatgataccagagcattacaacagccatcgaggacttataatgtactcatgggattgtcctatggagcaatgtaaacgtaactcaaccagtatatattttaagatggaaaatgatcttccacaaaaaatacagtgtactcttagcaatccattatttaatacaacatcatcaatcattttgacaacctgtatcccaagcagcggtcattcaagacacagatatgcacttatacccataccattagcagtaattacaacatgtattgtgctgtatatgaatggtattctgaaatgtgacagaaaaccagacagaaccaactccaattgattggtaacagaagatgaagacaacagcataactaaattattttaaaaactaaaaagccatctgatttctcatttgagtattacaatttttgaacaactgttggaaatgtaacttgaagcagctgctttaagaagaaatacccactaacaaagaacaagcattagttttggctgtcatcaacttattatatgactaggtgcttgctttttttgtcagtaaattgtttttactgatgatgtagatacttttgtaaataaatgtaaatatgtacacaagtg

SEQ ID NO: 352 - DNA, 565 bp, Homo sapiens
  misc_feature: Incyte ID No: 026410.1
tttttaaaaacctgtatctgacccactttgtaatttttgctccaatatccattctgtagacttttgaaaaaaaagtttttaatttgatgcccaatatattctgaccgttaaaaaattcttgttcatatgggagaagggggagtaatgacttgtacaaacagtatttctggtgtatattttaatgtttttaaaaagagtaatttcatttaaatatctgttattcaaatttgatgatgttaaatgtaatataatgtattttctttttattttgcactctgtaattgcactttttaagtttgaagagccattttggtaaacggtttttattaaagatgctatggaacataaagttgtattgcatgcaatttaaagtaacttatttgactatgaatattatcggattactgaattgtatcaatttgtttgtgttcaatatcagctttgataattgtgtaccttaagatattgaaggagaaaatagataatttacaagatattattaatttttatttatttttcttgggaattgaaaaaaattgaaataaataaaaatgcattgaacatc

SEQ ID NO: 353 - DNA, 421 bp, Homo sapiens
  misc_feature: Incyte ID No: 215720.1
  unsure 250, 331: a, t, c, g, or other
agcagggtcagctgcagatgaggctgccccaggactggctgccagccctcaaagagccccctgggtccccctggcacaactctctgcatgaagcccccagcaggagaagggctcactgccctgagcccgacacagtacgagacggaggcctcactgagtccaggccccgcactggccctcccctggatcctgagtccaggccccaagccagcccctcccctggatctccccagaccctctctgtgggaanccaggggctggagccgctcgactacatcttggtagctctcatttgggacctcatctttaatctcagcaactcagggatcanagagaaaaggctgaggcaggcgaggccagggtttcttgctcaagcattcggatcattaaacaaacgaaaaaaatcaaagagaaaaaaaaa

SEQ ID NO: 354 - DNA, 5581 bp, Homo sapiens
  misc_feature: Incyte ID No: 472165.22
cttgtccttcctcccgctttttcttctctctccttgcggtctgaagatgccctcggccaccagccacagcgggagcggcagcaagtcgtccggaccgccaccgccgtcgggttcctccgggagtgaggaggccgcgggagccggggccgccgcgccggcttctcagcaccccgcaaccggcaccggcgctgtccagaccgaggccatgaagcagattctcggggtgatcgacaagaaacttcggaacctggagaagaaaaagggtaagcttgatgattaccaggaacgaatgaacaaaggggaaaggcttaatcaagatcagctggatgccgtttctaagtaccaggaagtcacaaataatttggagtttgcaaaagaattacagaggagtttcatggcactaagtcaagatattcagaaaacaataaagaagacagcacgtcgggagcagcttatgagagaagaagctgaacagaaacgtttaaaaactgtacttgagctacagtatgttttggacaaattgggagatgatgaagtgcggactgacctgaaacaaggtttgaatggagtgccaatattgtccgaagaggagttgtcattgttggatgaattctataagctagtagaccctgaacgggacatgagcttgaggttgaatgaacagtatgaacatgcctccattcacctgtgggacctgctggaagggaaggaaaaacctgtatgtggaaccacctataaagttctaaaggaaattgttgagcgtgtttttcagtcaaactactttgacagcacccacaaccaccagaatgggctgtgtgaggaagaagaggcagcctcagcacctgcagttgaagaccaggtacctgaagctgaacctgagccagcagaagagtacactgagcaaagtgaagttgaatcaacagagtatgtaaatagacagttcatggcagaaacacagttcaccagtggtgaaaaggagcaggtagatgagtggacagttgaaacggttgaggtggtaaattcactccagcagcaacctcaggctgcatccccttcagtaccagagccccactctttgactccagtggctcaggcagatccccttgtgagaagacagcgagtacaagaccttatggcacaaatgcagggtccctataatttcatacaggattcaatgctggattttgaaaatcagacacttgatcctgccattgtatctgcacagcctatgaatccaacacaaaacatggacatgccccagctggtttgccctccagttcattctgaatctagacttgctcagcctaatcaagttcctgtacaaccagaagcgacacaggttcctttggtatcatccacaagtgaggggtacacagcatctcaacccttgtaccagccttctcatgctacagagcaacgaccacagaaggaaccaattgatcagattcaggcaacaatctctttaaatacagaccagactacagcatcatcatcccttcctgctgcgtctcagcctcaagtatttcaggctgggacaagcaaacctttacatagcagtggaatcaatgtaaatgcagctccattccaatccatgcaaacggtgttcaatatgaatgccccagttcctcctgttaatgaaccagaaactttaaaacagcaaaatcagtaccaggccagttataaccagagcttttctagtcagcctcaccaagtagaacaaacagagcttcagcaagaacagcttcaaacagtggttggcacttaccatggttccccagaccagtcccatcaagtgactggtaaccaccagcagcctcctcagcagaacactggatttccacgtagcaatcagccctattacaatagtcgtggtgtgtctcgtggaggctcccgtggtgctagaggcttgatgaatggataccggggccctgccaatggattcagaggaggatatgatggttaccgcccttcattctctaacactccaaacagtggttatacacagtctcagttcagtgctccccgggattactctggctatcaacgggatggatatcagcagaatttcaagcgaggctctgggcagagtggaccacggggagccccacgaggtcgtggagggcccccaagacccaacagagggatgccgcaaatgaacactcagcaagtgaattaatctgattcacaggattatgtttaatcgccaaaaacacactggccagtgtaccataatatgttaccagaagagttattatctatttgttctccctttcaggaaacttattgtaaagggactgttttcatcccataaagacaggactacaattgtcagctttctattacctggatatggaaggaaactatttttactctgcatgttctgtcctaagcgtcatcttgagccttgcacatgatactcagattcctcacccttgcttaggagtaaaacaatatactttacagggtgataataatctccatagttatttgaagtggcttgaaaaaggcaagattgacttttatgacattggataaaatctacaaatcagccctcgagttattcaatgataactgacaaactaaattatttccctagaaaggaagatgaaaggagtggagtgtggtttggcagaacaactgcatttcacagcttttccagttaaattggagcactgaacgttcagatgcataccaaattatgcatgggtcctaatcacacatataaggctggctaccagctttgacacagcactgttcatctggccaaacaactgtggttaaaaacacatgtaaaatgctttttaacagctgatactgtataagacaaagccaagatgcaaaattaggctttgattggcactttttgaaaaatatgcaacaaatatgggatgtaatccggatggccgcttctgtacttaatgtgaaatatttagatacctttttgaacacttaacagtttctttgagacaatgacttttgtaaggattggtactatctatcattccttatgacatgtacattgtctgtcactaatccttggattttgctgtattgtcacctaaattggtacaggtactgatgaaaatctctagtggataatcataacactctcggtcacatgtttttccttcagcttgaaagcttttttttaaaaggaaaagataccaaatgcctgctgctaccacccttttcaattgctatcttttgaaaggcaccagtatgtgttttagattgatttccctgtttcagggaaatcacggacagtagtttcagttctgatggtataagcaaaacaaataaaacgtttataaaagttgtatcttgaaacactggtgttcaacagctagcagcttatgtgattcaccccatgccacgttagtgtcacaaattttatggtttatctccagcaacatttctctagtacttgcacttattatcttttgtctaatttaaccttaactgaattctccgtttctcctggaggcatttatattcagtgataattccttcccttagatgcatagggagagtctctaaatttgatggaaatggacacttgagtagtgacttagccttatgtactctgttggaatttgtgctagcagtttgagcactagttctgtgtgcctatgaagttaatgctgcttattgtctcattctgacttcatggagaattaatcccacctttaagcaaaggctactaagttaatggtattttctgtgcagaaattaaattttattttcagcatttagcccaggaattcttccagtaggtgctcagctatttaaaaacaaaactattctcaaacattcatcattagacaactggagtttttgctggttttgtaacctaccaaaatggataggctgttgaacattccacattcaaaagttttgtagggtggtgggaaatgggggatcttcaatgtttattttaaaataaaataaaataagttcttgacttttctcatgtgtggttgtggtacatcatattggaagggttaacctgttactttggcaaatgagtatttttttgctagcacctccccttgcgtgctttaaatgacatctgcctgggatgtaccacaaccatatgttacctgtatcttaggggaatggataaaatatttgtggtttactgggtaatccctagatgatgtatgcttgcagtcctatataaaactaaatttgctatctgtgtagaaaataatttcatgacatttacaatcaggactgaagtaagttcttcacacagtgacctctgaatcagtttcagagaagggatgggggagaaaatgccttctaggttttgaacttctatgcattagtgcagatgttgtgaatgtgtaaaggtgttcatagtttgactgtttctatgtatgttttttcaaagaattgttcctttttttgaactataatttttctttttttggttattttaccatcacagtttaaatgtatatcttttatgtctctactcagaccatatttttaaaggggtgcctcattatggggcagagaacttttcaataagtctcattaagatctgaatcttggttctaagcattctgtataatatgtgattgcttgtcctagctgcagaaggccttttgtttggtcaaatgcatattttagcagagtttcaaggaaatgattgtcacacatgtcactgtagcctcttggtgtagcaagctcacatacaaaatacttttgtatatgcataatataaatcatctcatgtggatatgaaacttcttttttaaaacttaaaaaggtagaatgttattgattaccttgattagggcagttttatttccagatcctaataattcctaaaaaatatggaaaagttttttttcaatcattgtaccttgatattaaaacaaatatcctttaagtatttctaatcagttagcttctacagttcttttgtctccttttatatgcagctcttacgtgggagacttttccacttaaaggagacatagaatgtgtgcttattctcagaaggttcattaactgaggtgatgagttaacaactagttgagcagtcagcttcctaagtgttttaggacatttgttcattatattttccgtcatataactagaggaagtggaatgcagataagtgccgaattcaaacccttcattttatgtttaagctcctgaatctgcattccacttgggttgtttttaagcattctaaattttagttgattataagttagatttcacagaatcagtattgcccttgatcttgtcctttttatggagttaacggggaggaagacccctcaggaaaacgaaagtaaattgttaaggctcatcttcatacctttttccattttgaatcctacaaaaatactgcaaaagactagtgaatgtttaaaattacactagattaaataatatgaaagtctggttttctcactgtccttgaacgcagtctgcttaagttgttaaaaaccatccagcaaaagctgtagttgaagaagtgctactggtgtgaagagaggaaaaggttataaaagcaatctgatagcctcatctaatacacttctcagcttctgctactaatatc

SEQ ID NO: 355 - DNA, 629 bp, Homo sapiens
  misc_feature: Incyte ID No: 206580.1
tattaatctaagtcaatgaatctaagtcaatgaatacatacttgtatgtattcactatgcttatacatatgcttacttcatagtcctttcagagattgtccaaacaattcaaaaattaactgacatcttttcccacaaaaagattcattcagtacctgcccaataggataccattttagggattttcctgggttctttaattgtctatcactcaaagatgtgtacatttccaaaagttagctcaaaaatatttgtcattcgtgtttaagctataaggaaaactttcattactttttattggctttttttgctgtccttatgactttacttttaaaataaaattttgggttttctccaaacatttgaaaccaccaaccatagaaaatacaaataacactgccattaaaaacgtgttgcaaattttagtgtatttacacaagacctctacatttttccagtttttctcccctctcttcactgcgctgattcaaacttgtcataagcaagattggagatgcactaaacaagatcaagcaacaccttgttttattttcattccacctataccacagtgaggaaaaacaagttaaatgtcccgcccattgtcatgaactatgcacccacaaact

SEQ ID NO: 356 - DNA, 4972 bp, Homo sapiens
  misc_feature: Incyte ID No: 344775.3
  unsure 4653, 4702-4771: a, t, c, g, or other
gcgctgcttgaggacgaggacgaggagccaccccctgctcaagccttgggtcaggccgcgcagccgccgccggagcccccggaggcggcagccatggaggccgcggccgagccagatgcttccgagaagccggcggaggccacggccgggtcaggcggggtaaatggtggcgaagagcagggcctcggcaagagggaggaagacgaacccgaggagcggagcggggacgagacgccgggatccgaggtgccgggtgacaaggccgccgaggaacagggagatgaccaggatagtgaaaagtcaaaaccagcaggctcagatggtgagcggcggggggtaaagagacagcgggatgagaaggatgaacatggccgagcttactatgaattccgagaggaggcttaccacagccgctcaaagtctccactgcctcctgaagaagaggcaaaagatgaggaggaggatcaaactcttgtgaacctggacacgtatacctcggatctgcattttcaagtgagcaaagaccgctatggagggcagccacttttctcagagaagttccccaccctttggtctggggcaaggagtacttacggagtgacaaagggaaaagtctgctttgaggcaaaggtaacccagaatctcccaatgaaagaaggctgcacagaggtctctctccttcgagttgggtggtctgttgatttttcccgtccacagcttggtgaagatgaattctcttacggtttcgatggacgaggactcaaggcagaaaatggacaatttgaggaatttggccagacttttggggagaatgatgttattggctgctttgctaattttgagactgaagaagtagaactttccttctccaagaatggagaagacctaggtgtggcattctggatcagcaaggattccctggcagaccgggcccttctaccccatgtcctctgcaaaaattgtgttgtagaattaaacttcggtcagaaggaggagcccttcttcccaccaccagaagagtttgtgttcattcatgctgtgcctgttgaggagcgtgtacgcactggcagtccctcccaagaccatagaggaatgtgaggtgattctgatggtgggactacccggatctggaaagacccagtgggcactgaaatatgcaaaagaaaaccctgagaaaagatacaatgtcctgggagctgagactgtgctcaatcaaatgaggatgaagggtctcgaggagccagagatggaccccaaaagccgagaccttttagttcagcaagcctcccagtgccttagtaagctggtccagattgcttcccggacaaagaggaactttattcttgatcagtgtaatgtgtacaattctggccaacggcggaagctattgctgttcaagaccttctctcggaaagtggtggtggttgtccctaatgaggaagattggaagaagaggctggagttgaggaaggaagtagagggagatgatgtgcctgaatctataatgctggagatgaaagccaacttctctttgcctgaaaaatgcgactatatggatgaggtgacatatggggagctggagaaggaggaagctcagcccattgtcactaagtacaaggaggaggcaaggaagcttctgcccccctccgagaagcggacaaatcgccgaaacaaccgaaacaagcgtaaccggcagaaccgaagccggggccaaggctatgtgggcgggcagcgccgaggctacgacaaccgggcctacgggcagcagtactgggggcagcctggaaacagagggggttaccgtaatttctatgatcgatacaggggagactatgatcgattttacgggcgagattatgagtacaacagatacagagactattacagacaatacaatcgggattggcagagttactactaccaccacccccaggacagagaccgatactacaggaattactacgggtaccaagggtatcggtgaagcccctgccatggtcacctgtcagccatgaagctgaatctctgggggtgccaggcacccccgcaaaacacaaccaaggaaaacaggggctgtcggggtggggctgagctgccggggaggggtggtggggggggagggtgctcaagcaggggtgggggaggggggaggtggaaacaaacaacaaaactgtacattttttttaaagtttgttgaaaagaatattgtcttattctataaaacatttcaaacctagttagagatttgtaatcaaaaaacatttgcgcagaaagcagcacttagggctgcctgttctataccctacagtcagacaggaaaagaactgaaaatggcacccttctgacattctgaggcagctggactggcagccaagtaaaggagagtgatgaggtggtgtggggagggtggggaggcagcgcgagggtgctctccacagcaggtaggagcaggcaggagtggggacagagggagagcttgtgactgggacagtgaaaataaacgattggctcttatcaatcacttgcaccaactaaccgtttgtattttctttaccgacctttcccttttgggatatgtggtctggtgggctgggaggcttacagtgtcccaactctccattttcctgtgcctttgtgctgtttggctgaggcatggagactgccagtgggtggttctattttacaggattcccaggccaagaaagcctggggactgtccttgatggcagagcagaatagcctgccccttctatagacccattgattaattcctgtaaaatcttggggagaatgggattgcagccctcagcctaaagattgtgatttgccagtctctagtctctgtcttccaaggttgagagaggtgggaggtctctgaaatcatccctgttagagtgtctgtcctcttacagtgcgagagaaggaacgtttctcagggtttcagctcacacgaaaacacagcaggattcttttcactgcagcgggatatgtatataggtgaatcctgtggtgtgggctcacaggcccaggtgctgagaatagcaactagcaactattttctacagtgtggagggctcgtgccctgctggtttttttgatacacaggtagagaatgaatagaagaggggagggtggtgggggggggtgggaggcagctcagtggggctgctgaaccttgggaagagtgtgagtgtgaacgtgtgtaaatgtgcgtgtgaaagggagcaccccttcccgacttctagaaacaaaattccttttggggcgctttccctgtgtgtccccagagaggcctctagccaggagccttcagttgggatagtttcatttgtgactttaccaataccctcccagttcttgatagacagctgtaggttgctgggttcaagaatatgggtgggatatggaatgctctttcaatgtctagcttcagttttcattcatcctcctgctcagcactgtcagccaagagcttactcagcagacaccacatactgcagcagttcctagtgagaaaatctgtgccactagaaaatgcttcacttccatttcctcacctgggcagttctctgtttaaaattgtgggctgatttggtcttcctctcctcctcccactgttactgccctgcagcccttgttcaggtgtacagacccttattctggcctctagtgtccttgtctgtcatgacacacccttccgcccaaatacctctgaccccaaggctggaatggggctggtaggagataagtttgcttactcatagtcatgtcctttctcttggcacctgcttccctgcggtgtcctcaaatggatttctgtgtggcagtggagtgattgcatgaatttttctgtaacacattaactttgtattattattaagggagtttgagaaagctttgcttataatgtcaaggcaaggaggtaaaaactggagcccaaagaaattcccttagggcaagattatgttataatagaaaattgaatttcctgaggcagtggctgccaccccttttcagatgtttagtcctgcaaatagcatctttcttgtagtctgtgacatggatggggatgctagggcccttaggggcaaggggactaaactaaatcaagttgagtttttttccagcaggggttaggggaggtactcgctgttgatatttgacactagaaagtaatcttttttacaaaactgtttttctaggtgggtggaaagtgaaactgccacatccttgttggtttagtccaagagatcatttgcaacaacagtagatgtccgggttttgtttctgtctttttattatgaaaaactatgttaagggggaaaatgtggattatggtaaccagaggaatccctagccttgttttccttagaagacttgtttagtgttttatcagacgtctgttgtagttgtagacaggaaagcttgtgagaaaaacaccacatggagcctgtaaatgtttttgcacaacctgtaaagcattcttggaagtggccagtaaaaaggggttttaccatttaaaaaaaaaatgtaactgtgtcattgtttacatctgtaactttttcctcccctgttctcattacaccattctggcgaaaatgtaggcaaagtagcttccagttttagaataaataaccatttggattgaaaaanaaaaaaaaaggcccaacctgggacttctaagcctccatattctggaagnnnnnnnnnnnnnnnnnnnnnnnnnnnnnnnnnnnnnnnnnnnnnnnnnnnnnnnnnnnnnnnnnnnnnncatgatttccaatgactgcaggacccaagttcacaatgcaagggcagttctggaaaaggctggcattcttcagtaggaaaggaaacattaagctgtgtgattttaccttgaaatccccgctattagttttgatagaattttctttggtcagaaatgtgtgattcacaaactaaaatttcctaaaaagttaactgtggtgct

SEQ ID NO: 357 - DNA, 1416 bp, Homo sapiens
  misc_feature: Incyte ID No: 334668.1
cccgaaacagcttgaacgaaaggtggttaacacgtgaccaatccccatggcagacagcgggctggtgaacaggaagagcacagaatctctgtggggcgatgctgcagcggctgaaaccacgtcaagtcccccagagcccggcattctatgtaagcatccacctgtgacgccgtggagcaggatcttcattcatctcaccagagcaacagcccagtcctgaggatgggagggacgtgacttagccttgggattccacgctcgccgccctcccttggccgccctactccccagtttcctggcgatgagccatttattgtgtctcacaccagcctcatttccaactccgacttcctacttagaatgtggcagtggctttgtgagtgagaatcctgatgagttttccagtggcctctgcagaagctggcccccttctaagggcatagctaacccccttcccactcctgagtcactgaattcgaggagggtggggcagggaaagggctggcccccctgctgaaatcttgattctgcatttgaggaaggtcagggtgccgctgggggagcagggagcggggagggaggaagaggggaatgcacatcttttgcgccactattaaggcacctgtcaccttacatctcaatctggaatcaaagtgccctgggttgagaagcagacctgggctctggtcacactttggtcactcattagctctaggaccagtcactaatctctgagactccattttctccagggaaacgaggcttgcccagatagactaacaaccctttagtgctccaagaagtgagaatttccgaaaaagatctgccggcccagagcactccctcttgccctaatcctggcagggtctggatgtatttacccaactctgatcttgcgtgcagggatgcttgctgatggatgaaagaccacaataaaacaagattagcagcaaaacaattttaattgtcagtgaaaagcaaacatgtttgtcagactctcctgtggagtcatttcaaatggtaactcttctcttgtaccaggaagcagctgtaggtggggtaatgggatctgtctcctggtgcagaggggcagcttatggcggcagcagcttcaacaagcccgtcccacggccagccctaactgggccaagtgcaagctcctgatgagctgctgggcctggcagcgttccccacttcctagtgccttgctcccctggaattccacagccaatcaaccacagcagccgtgtcctccttgccagaaataacatcattcgtacgtcctgcctttgtaaaaatcaagacccagttaaccatcacccacttcttgcccctgattgatggggtccctgagtacaagcgtcctgtgcaatcccctccctcctaccgctttcctagctaagccctgctagcccc

SEQ ID NO: 358 - DNA, 2336 bp, Homo sapiens
  misc_feature: Incyte ID No: 416874.3
gaccgcagccccggagcccgggccagggtccacctgtccccgcagcgccggctcgcgccctcctgccgcagccaccgagccgccgtctagcgccccgacctcgccaccatgagagccctgctggcgcgcctgcttctctgcgtcctggtcgtgagcgactccaaaggcagcaatgaacttcatcaagttccatcgaactgtgactgtctaaatggaggaacatgtgtgtccaacaagtacttctccaacattcactggtgcaactgcccaaagaaattcggagggcagcactgtgaaatagataagtcaaaaacctgctatgaggggaatggtcacttttaccgaggaaaggccagcactgacaccatgggccggccctgcctgccctggaactctgccactgtccttcagcaaacgtaccatgcccacagatctgatgctcttcagctgggcctggggaaacataattactgcaggaacccagacaaccggaggcgaccctggtgctatgtgcaggtgggcctaaagccgcttgtccaagagtgcatggtgcatgactgcgcagatggaaaaaagccctcctctcctccagaagaattaaaatttcagtgtggccaaaagactctgaggccccgctttaagattattgggggagaattcaccaccatcgagaaccagccctggtttgcggccatctacaggaggcaccgggggggctctgtcacctacgtgtgtggaggcagcctcatcagcccttgctgggtgatcagcgccacacactgcttcattgattacccaaagaaggaggactacatcgtctacctgggtcgctcaaggcttaactccaacacgcaaggggagatgaagtttgaggtggaaaacctcatcctacacaaggactacagcgctgacacgcttgctcaccacaatgacattgccttgctgaagatccgttccaaggagggcaggtgtgcgcagccatcccggactatacagaccatctgcctgccctcgatgtataacgatccccagtttggcacaagctgtgagatcactggctttggaaaagagaattctaccgactatctctatccggagcagctgaaaatgactgttgtgaagctgatttcccaccgggagtgtcagcagccccactactacggctctgaagtcaccaccaaaatgctgtgtgctgctgacccacagtggaaaacagattcctgccagggagactcagggggacccctcgtctgttccctccaaggccgcatgactttgactggaattgtgagctggggccgtggatgtgccctgaaggacaagccaggcgtctacacgagagtctcacacttcttaccctggatccgcagtcacaccaaggaagagaatggcctggccctctgagggtccccagggaggaaacgggcaccacccgctttcttgctggttgtcatttttgcagtagagtcatctccatcagctgtaagaagagactgggaagataggctctgcacagatggatttgcctgtgccacccaccagggcgaacgacaatagctttaccctcaggcataggcctgggtgctggctgcccagacccctctggccaggatggaggggtggtcctgactcaacatgttactgaccagcaacttgtctttttctggactgaagcctgcaggagttaaaaagggcagggcatctcctgtgcatgggtgaagggagagccagctcccccgacggtgggcatttgtgaggcccatggttgagaaatgaataatttcccaattaggaagtgtaacagctgaggtctcttgagggagcttagccaatgtgggagcagcggtttggggagcagagacactaacgacttcagggcagggctctgatattccatgaatgtatcaggaaatatatatgtgtgtgtatgtttgcacacttgtgtgtgggctgtgagtgtaagtgtgagtaagagctggtgtctgattgttaagtctaaatatttccttaaactgtgtggactgtgatgccacacagagtggtctttctggagaggttataggtcactcctggggcctcttgggtcccccacgtgacagtgcctgggaatgtattattctgcagcatgacctgtgaccagcactgtctcagtttcactttcacatagatgtccctttcttggccagttatcccttccttttagcctagttcatccaatcctcactgggtggggtgaggaccactccttacactgaatatttatatttcactatttttatttatatttttgtaattttaaataaaagtgatcaataaaatgtgatttttctgatgac

SEQ ID NO: 359 - DNA, 1643 bp, Homo sapiens
  misc_feature: Incyte ID No: 427964.2
ctccgcacggcgcgggtgagtcagaacccagcagccgtgtaccccgcagagccgccagccccgggcatgttccgagacttcggggaacccggcccgagctccgggaacggcggcgggtacggcggccccgcgcagcccccggccgcagcgcaggcagcccagcagaagttccacctggtgccaagcatcaacaccatgagtggcagtcaggagctgcagtggatggtacagcctcatttcctggggcccagcagttaccccaggcctctgacctaccctcagtacagccccccacagccccggccaggagtcatccgggccctggggccgcctccaggggtacgtcgaaggccttgtgaacagatcagcccggaggaagaggagcgccgccgagtaaggcgcgagcggaacaagctggctgcggccaagtggcaggaaccggaggaaggaactgaccgacttcctgcaggcggagactgacaaactggaagatgagaaatctgggctgcagcgagagattgaggagctgcagaagcagaaggagcgcctagagctggtgctggaagcccaccgacccatctgcaaaatcccggaaggagccaaggagggggacacaggcagtaccagtggcaccagcagcccaccagccccctgccgccctgtaccttgtatctccctttccccagggcctgtgcttgaacctgaggcactgcacacccccacactcatgaccacaccctccctaactcctttcacccccagcctggtcttcacctaccccagcactcctgagccttgtgcctcagctcatcgcaagagtagcagcagcagcggagacccatcctctgacccccttgggctctccaaccctcctcgctttgtgaggcgcctgagccctactccctgcagatgccaccctagccaatgtctcctccccttcccccaccggtccagctggcctggacagtatcccacatccaactccagcaacttcttctccatccctctaatgagactgaccatattgtgcttcacagtagagccagcttggggccaccaaagctgcccactgtttctcttgagctggcctctctagcacaatttgcactaaatcagagacaaaatatttcccatttgtgccagaggaatcctggcagcccagagactttgtagatccttagaggtcctctggagccctaaccccttccagatcactgccacactctccatcaccctcttcctgtgatccacccaaccctatctcctgacagaaggtgccactttacccacctagaacactaactcaccagccccactgccagcagcagcaggtgattggaccaggccattctgccgccccctcctgaaccgcacagctcaggaggcgcccttggcttctgtgatgagctgatctgcggatctcagctttgagaagccttcagctccagggaatccaagcctccacagcgagggcagctgctatttattttcctaaagagagtatttttatacaaacctaccaaaatggaataaaaggcttgaagctgtggcctgagtgcctcactggacccagaggccaatgggagagtatttggagccctaggtcccagccttagctctacagactcactgcaaaaaaaaaa

SEQ ID NO: 360 - DNA, 3668 bp, Homo sapiens
  misc_feature: Incyte ID No: 234537.3c
aaagagcttatcttcaattttattgttgggaatctacaattgcaaagtggttcaaagtcatttcttataccacttcacaatacacacacagatttaggaaacttaaaaaaagttctttaaaaaattctaataggatttaccctattttactggccaagtgtaaaaaataaaccctaaatgtgcctttctctaattttccttgtacaatcttattgacattttttatagctaatccatatatgcatagaaccgaggctattattttgctgcaacaacttttataaaaaggttatgaagtttaaaagtatattttgtatcaagagtacttaatatttgtaaacactaagaaacaaacatacttcctatcaaaacctctagctgccatttgcacactgtttttaaggtgaagcctcccatttcttgaattacttatgcagagctgagcaggctcatgtggttccactcccacgttaagtatttgttctttgggcataggtcatttcatcagcatgggtattttctgaccacccactcagagggtcccactttccagcagaagttctcatatctgggcttaagaatgatttacagtgactgttcagatttggaggcagagcgacttaaaaaatgtatacctcttcctaaagtcatttattttcttcgagaactctggacattccataactgggtgtgtagtatgagtagaatgaattcagtgctagcctcttgctggagagggacaagtgcaggtttagaattacagcttatgttagaaggttctcttctcatgataccttcatgttagaagaaagaggacagaggcagagctgcatggaatctcataaaataacagctaatgccgtgtgtcaggcactatgcttaacaagtatctgtttaacatgtgtaaatgctctttagctcttgcttttctataatataaaacagtcctggagtcctgttcttccccttcctttctctcgtgtcctttgactgtcttttgcagcctctggcctttctcattatctactacagcttgctacctgactcatcaaaggcacatgggtgttgcaagagaggatggtatcctgtgtttataccattaaacttgctattataacaggagctataaagtgaaaaaatagagacaagaaataaagcagagatttgtcatccatgagcttggggctattgataattatgaagagaggagatattaagtattctgaacagtaacttgatatagttgagaatgctggacttgagttcaaaagacctaggtctaggtcttggatctgtcagcattagctgtatggtcaacgtcaaccctttttgagcttcaagttttttcatctgacacggtgggaaaaacatctctctttcctaccaaaaataagttgtggatatcaaatgagacagtgtgcttaaaacttccttgtgaatgataaaattttatgtaaacataagctgtttgatggattagaaatggatatgaagaagaaaaatatggtttaaaattgttagtaaaatttcattaaaatttggacacgtaaacttaacatagttggctttctccttatagggccctatgttaattttttttctaactcactaggttgctgaccctgagtaatcatgtctgtctcttcattttataatgctctaaccttcagcttctaggagcctgtaaagatggtttttgctgtcacaaagccaggtcctaaaaggcagatttgaatctcacttgaaaaaatgcagtttcacacattaaaggcaaggagaatttttggctattggtataaaacaaagatcactgcccaaagtgaaagaaatattaaagaaaagcttccatggcagtgacttcctgtggaaaacttgatccgaccttcaactgctggataaattactttcattttggagatatatgtagaaaccacgttgatatcttggtcaccagagtcatgtcttaataattcatcttttatcatctggaacccatctccaccattggccaggaagtttgggaggatcaccttatatacctcgtccattttgagagggtcataactgggcactcgacacttggtgcaaagaacatctaatttgactactctgtctccaggttttcgggaaagatcatacaccacatggattccgcccacctgcaggaactctccagtggactggccgtagcggtgcacgctatgctcaaaggccttcttcagggtggaaccttttaactggactaggtcaaatgtgcctccaaagggcaatacagcagccaggttctcccaggtaattgtgccattgttgcgttcatcaatgggcgaccggataccacctccatttaaaatgcacatggatacgtggttccagaacatttcatccgcgtgtctcaggttgttgttaatcattgcatcacaaatcaggttgcccatgttgcattctctaaagcggcatgattgagaggagccatccagatagacaattgttttccctaattcctgggtagaataattatccaattttatcctccatttgttaatgtctgcttttatgcttggatcttcaggaatgctgctgtttagaagaatgggatttccatgggaagagatgacgtttcctctttcatcaaactcgatcttcagatagcctaggtatttgccaaaagcataggcctggactacaggaaccttccgcccatcatcagaagtgactatgaatgggtacttcccagcaggcacctctttggaaggtggattgcctgtgtaaagaaatgtgttggagtgtcctcccaccacgacgtccacacccctcactttctgagcgatgagtttatccatttcaaaacccgaatgtcccagtgcaataattttgttcacatttagagtttttaacttatctacttcaggttgtaatgcagtgatttcatcttcaaacactaaatttgtccctggatttgagagaaaaggggtttctttggaagtgtatccaacgattcccacaacttcatcaccaacaggaagaactttatatggcaaataaagtcctgatatttgagatgctagtggcccctttgctttaatgtttgcactcagaattggaaatttggcctctttgaggagtggctcgatcagtccttccacaccattatcaaattcatgatttcccagtgccatggcatcgtagcgcagggcgttcatgaagtgcgccacctcggcgcccttgtacacggtgaaccagatagtgccctggtactggtcgccggcgtccagcagcagcacgttgggttcggcgcggcggatctgctgaaccttggtgaagagccgagccacgccacccatgcagcggctggcgttgacgcacttgctggagtcctcgctggtctgctccagccggctgtgcacgtcgttggtgtgcaaaatcgtaagctcccaggcgccagccgcaggccacagcaccgcgcccagggcgaggagtagcgtcgcgggcgcccgcgcggctcggggacacatagctgtggcgcgtgaactgggtgcgaaagcgggcgagccgggcgagtgccggcgagtaggggcgagcagctagggccggggctcggtgccccggctggaggggcggggcccgggtcatcgagccgaactccgagctcacgcacgtttgcatgcgac

SEQ ID NO: 361 - DNA, 339 bp, Homo sapiens
  misc_feature: Incyte ID No: 031760.1
gagaatggaaatagggctgtaagcatgaacaaccagtcaagttacaaatatagaatactctctcaattccactttagttagtcatggagggacagtgtgagttttataaacttataaggaatatacaaacagttccaaatttaaaataacttgaagtaacttttaagtgtgtgaaaagaatatttttttccaccctgtccatttaagcatctgtgacaggcagtattaagtgatgggtgtctttacgtacacatgcctgttgctcacagtactggggaagagttgcaaaatagtcacccattctgcagtgatttctctcttcttatttgtgaaagactc

SEQ ID NO: 362 - DNA, 6106 bp, Homo sapiens
  misc_feature: Incyte ID No: 336953.7
ctgtattttcaaattctttacctctgcgtttccagccttgctccatccaatttgttactagagctttttaacaatttcacgttgaattaagatgatttggaagaggagaaacaagagtcagaaaaattagcagcatccgtgatctgactctgggtaccagtgggttgttgagatttctgttccccactcactgcagagctgctgcctgccaatgccccctgttgggcagggccacctgtgctagtttaacctggggtctttcactcccggactgcttcttggatgtgagttttaagttgagcagagaagatatgccttgcctgctgccatacattgtaacatcaagtcaagagctttagttacttaacagatttctgctggctgctattataggaggaaactcctttgtttagggacagccagggcttccttagctttgatctttgggagtgagccttttgcttgacttcccttctcttttccatgcctttgtttccatctcgaagtgcaaatttaaagtgtcctgtttgcctttatccactggaaggcaaacaccctggacgacgtatcagtgacagcgcggttctgctttgatcggagcacccagcgctgcttgaaggcgtttgcatggtccatggctcatggaccacgctcctagaaaacggaaatgcacttagattgtcaagtggtcagactgttgtttgccattagcttgcagacctggggatccttatcggctaattgctgaagcaagtgtggacaacttcagcaagctgggggtggcgttcatggaagatagactccacatggataatggactggtaccccaaaagattgtgtcggtgcacttgcaggactccactctgaaggaagttaaggatcaggtctcaaacaagcaagcccagatcctagagccgaagcctgaaccttctcttgagattaagcctgagcaggacggtatggagcatgttggcagagatgacccaaaggctcttggtgaagaacccaaacaaaggagaggcagtgcctctgggagtgagcctgctggggacagtgacaggggagggggccccgttgagcattatcacctccatctgtctagttgccacgagtgtctggaacttgagaacagcaccattgagtcagtcaagtttgcgtctgccgagaacattccagaccttccctacgattatagcagcagtttggagagtgttgctgatgagacctcccccgaaagagaagggaggagagtcaacctcacgggaaaggcacccaacatcctcctctatgtgggctccgactcccaggaagccctcggccggttccacgaggtccggtctgtgctggccgactgtgtggacattgacagttatattctctaccacctgctggaggacagtgctctcagagacccgtggacggacaactgtctgctgttggtcattgctaccagggagtccattcccgaagacctgtaccagaagttcatggcctatctttctcagggagggaaggtgttgggcctgtcttcatccttcacctttggtggctttcaggtgacaagcaagggtgcactgcacaagacagtccagaacttggttttctccaaggctgaccagagcgaggtgaagctcagcgtcttgagcagtggctgcaggtaccaggaaggccccgtccggctcagccccggcaggctccagggccacctggagaatgaggacaaggacaggatgattgtgcatgtgccttttggaactcgcgggggagaagctgttctttgccaggtgcacttagaactacctcccagctccaacatagtgcaaactccagaagattttaacttgctcaagtcaagcaattttagaagatacgaagtccttagagagattctgacaacccttggcctcagctgtgacatgaaacaagttcctgccttaactcctctttacttgctgtcagctgcggaggaaatcagggatcctcttatgcagtggcttgggaaacatgtggactccgagggagaaataaaatccggccagctctctcttagatttgtttcatcctacgtgtctgaagtagaaataaccccatcttgtatacctgtggtgaccaacatggaggccttctcatcagaacatttcaacttagagatctatcgccaaaatctgcagaccaagcagttggggaaagtaattttgtttgccgaagtgacccccacaacgatgcgtctcctggatgggctgatgtttcagacaccgcaggaaatgggcttaatagtgatcgcggcccggcagaccgagggcaaaggacggggagggaatgtgtggctgagccctgtgggatgtgctctttctactctgctcatctccattccactgagatcccagctgggacagaggatcccgtttgtccagcatctgatgtccgtggctgtcgtggaagcagtgaggtccattcccaagtatcaggatatcaacttacgagtgaagtggcccaacgatatttattacagtgacctcatgaagatcggcggagttctggttaactcaacactcatgggagaaacattttatatacttattggctgtggatttaatgtgactaacagtaaccctaccatctgcatcaacgacctcatcacagaatacaataaacaacacaaggcagaactgaagcccttaagagccgattatctcatcgccagagtcgtgactgtgctggagaaactgatcaaagagtttcaggacaaagggcccaacagcgtccttcccctttattaccgatactgggtccacagtggtcagcaagtccatctgggcagcgcagagggaccaaaggtgtccatcgttggcctggacgattctggcttcctccaggttcaccaggagggcggcgaggttgtgactgtgcacccggacggcaactccttcgacatgctgagaaacctcatcctccccaaacggcggtaatgccgggcgtccccgagacgcggctgcctgtccgtgcccatgcatctggaaatctaatttagagttgtaggtgaattttcttttcctccaattcatttgttaagtctttgttctttttctgtgtttctgtttgtttttaggtttgttttgttgtcgttttctttggtgtttgaagaggctctgggatagatggttaagaagtagaaaatttagtttagggaaagccctcccacaggtgggaaattgctctcccctctgtggcttggacttacgtttattgtcaaggggagtttttacatggaaatgacaatgggaaaattcagatattttcttagtagtgcagacctttacccctagtctatgaaaaaacaaaccaaaatatgctcttgcgcccaggccagtggtgagttagaggtatgctatcactgtttgtaagcatctggggaggtactgaactgtaagaacatgcttggacacttagtcattgttctgtgtttttattaatgaagaaaagggaagacagacttccaagagttactgtccacccggtggtgtggccccatagcgaagtctaaatgcctgtagagatagagctagctggtgtggttgcagtgaccttgtagaggaaatcagttcattactttgacatcattcagtgagctctcctttcctaaggaagtttaaatgtccttagttagggactgactttcttaagtaagtttaaatttactacatattgtgaagagacaggatcaagttcagaatccttaaatgtctgattaggcatcacttggatgaggaggtgggcgatttggctctgacagctggagatgaaggcacactcataccacatacaagggaggatttggagcttttaagccagtttcagatttactctgaaatgtggagcattcctgcaagactgtgcagctcacggaatatagaagacatggcattttactcagaagtcataagtttttgcccccctcatttacctcgtattaccaagaaagaaaatgttatcgatactaaacaccatcagttcagagggaggatgtgtgtgtgtgcccgcatatgtgtgtgcgtgcgtgtgtgcgcacatagctttaaaagaagacattcaaaatttgatgtgctacaagcctcatgaaagaacaaaagaaatgaagccttttgatatgcattcgctattcccagatgtacgccatgccttttccatgtccctcctatctctgttgaacttatgaatcatactcattacttttcagctttttaaaaggccaatttttgtccagttttctctcttccagtcccagctgaaattagtggaaagaaagtttgatggagctttcagctttgaacaaaatcccttcattgtaaactagcaccatctttatccaggtcttacccagtcaggctaattccagaaacttgtggtttttagtatagtctgtctacctttagccaggcacaggacagccctatgaaaaaatacccaatatatattttttggaaatgaaacattaaaagaacttaaaaagtaatttttggaaatgaggcttcaattagaattatttttctcaaaaaacaaacaaacaaaaaacacaaaaaaaaccactcttctccaaatgcccaagccttctttcaaaattagttagaaacttaagtaaaatacaagtccacaccatccccaaattacaaaatggacttacccttgagagggcatctgcagaatatcatcagggacaaagatctcgaggctaacgatgtaggtttcatttctcagactttgtaatataaggcaagccctctctcagagctgccatcatcactttttgaatttctttgggggttatttaatgaaaaacatgctatgttttgttttaagctgaagtcctattctggacactctgctttgggaaaaaatgttatcatttaatttcctttctgcaaattaaaactaatgaagtgtggccttgtcaaaggctatggagatgttccgggcatactgctgtgctctgtgctttccagcaggcgctcctccctcacgcaggagactcagttgtcctgagagagatgaagcagccttgaagcagatgctgcgttttccataaacctgattttgcctcacatgaaccaaagactctcaaaactccgcttctatagaattagctgaataaaggcattttactgatagctgttcgtgttagcgaaacctgtctacctgctatagcacactctccgatttgggccatttatgcaccccgcaacctgggatctcaaggagctttaaagtcttaatgggaacttggcattttcctgatgatctttaaaatgtggtcactaaactcaggattggcgtgtgcttttagaacactggagtagcccttgttttagaggctgtgcattgagtatcgaccgtattttgtaaaaggcaagatatcctcccttccaggctggtaacgggtttcaaggggactcttgaggaagtgccccctaaaatagaacacagcaataactgggcttcctgtccccacccccaccccagcagtgctctctggcactgggaactctgctagggagtggtggaagtaggaaggatttgtgtgcaaaggaaaatcgtggttgagtttcactgcagcaggctgacgttgcctgatgtgagagcaagtggccgactggggtgcgggtgcacaggtcgggggagcacaggccacagagcgcagcctctgggggtcccccaaggcacagcatatacagcatggtcgccccttgccctggagtctgggaacaaagagaggagccagcctccccgcactgcttcagatggaaaagggaggcagggtgggcttccgttctccagatctgtttgctcttaacaggcagaacatgggagaatccttattcctggttaatcactatgcatatttgaaataaaagaaagcgtaagcctctgcaattttaacttctcaaaggatgtctctgaaaagaatcactttaaaccaatgcctataaaaagcaagtctaccaaaataaactaagactttctatgtggtttgggctccccttcttatttttacaagtttcatttttaaacagtaggcaactactttgggttacagtatttttattcatat

SEQ ID NO: 363 - DNA, 642 bp, Homo sapiens
  misc_feature: Incyte ID No: 444771.20
caccaagggtgtgcagtacctcaacgagatcaaggacagtgtggtggccggcttccagtgggccaccaaggagggcgcactgtgtgaggagaacatgcggggtgtgcgcttcgacgtccacgacgtcaccctgcacgccgacgccatccaccgcggagggggccagatcatccccacagcaccacgtcctcgaattctcagacgacacctggagactgtcccgacacagcgacgctcccctgagaggtttctggggcccgctgcgtgccatcactcaaccataacacttgatgccgtttctttcaatatttatttccagagtccggaggcagcagacacgccctcttagtagggacttaatgggccggtcggggagggggaggcgggatgggacacccaacactttttccatttcttcagagggaaactcagatgtccaaactaattttaacaaacgcattaagaggtttatttgggtacatggcccgcagtggcttttgccccagaaaggggaaaggaacacgcgggtagatgatttctagcaggcaggaagtcctgtgcggtgtcaccatgagcacctccagctgtactagtgccattggaataataaatttgataaggtggtgaaaaaaaaaaaaaagg

SEQ ID NO: 364 - DNA, 3144 bp, Homo sapiens
  misc_feature: Incyte ID No: 449173.16
ctctctcgctgggtcgctcgggtcggcttcggtcgctaccgctcccgctctgccacccccgccaaccgccgctcgggcctccgtcgctgccgcgtcgctttctcgctccttggatcgcacatcctcccagatgcagcgccgggacgaccccgccgcgcgcatgagccggtcttcgggccgtagcggctccatggacccctccggtgcccacccctcggtgcgtcagacgccgtctcggcagccgccgctgcctcaccggtcccggggaggcggagggggatcccgcgggggcgcccgggcctcgcccgccacgcagccgccaccgctgctgccgccctcggccacgggtcccgacgcgacagtgggcgggccagcgccgaccccgctgctgcccccctcggccacagcctcggtcaagatggagccagagaacaagtacctgcccgaactcatggccgagaaggactcgctcgacccgtccttcactcacgccatgcagctgctgacggcagaaattgagaagattcagaaaggagactcaaaaaaggatgatgaggagaattacttggatttattttctcataagaacatgaaactgaaagagcgagtgctgatacctgtcaagcagtatcccaagttcaattttgtggggaagattcttggaccacaagggaatacaatcaaaagactgcaggaagagactggtgcaaagatctctgtattgggaaagggctcaatgagagacaaagccaaggaggaagagctgcgcaaaggtggagaccccaaatatgcccacttgaatatggatctgcatgtcttcattgaagtctttggacccccatgtgaggcttatgctcttatggcccatgccatggaggaagtcaagaaatttctagtaccggatatgatggatgatatctgtcaggagcaatttctagagctgtcctacttgaatggagtacctgaaccctctcgtggacgtggggtgccagtgagaggccggggagctgcacctcctccaccacctgttcccaggggccgtggtgttggaccacctcggggggctttggtacgtggtacaccagtaaggggagccatcaccagaggtgccactgtgactcgaggcgtgccacccccacctactgtgaggggtgctccagcaccaagagcacggacagcgggcatccagaggatacctttgcctccacctcctgcaccagaaacatatgaagaatatggatatgatgatacatacgcagaacaaagttacgaaggctacgaaggctattacagccagagtcaaggggactcagaatattatgactatggacatggggaggttcaagattcttatgaagcttatggccaggacgactggaatgggaccaggccgtcgctgaaggcccctcctgctaggccagtgaagggagcatacagagagcacccatatggacgttattaaaaacaaacatgaggggaaaatatcagttatgagcaaagttgttactgatttcttgtatctcccaggattcctgttgctttacccacaacagacaagtaattgtctaagtgtttttcttcgtggtccccttcttctccccaccttattccattcttaactctgcattctggcttctgtatgtagtattttaaaatgagttaaaatagatttaggaatattgaattaattttttaagtgtgtagatgcttttttctttgttgtttaaatataaacagaagtgtaccttttataataaaaaaaagaagttgagtaaaaaaaaaaaacacacaaacctgttagtttcaaaaatgacattgcttgcttaaaggttctgaagtaaaggcttgttaagtttctcttagttttgatttgaggcatcccgtaaagttgtagttgcagaatcccaaactaggctacatttcaaaattcagggctgtttaagatttaaaatcacaaacattaacggcagtaggcaccaccatgtaaaagtgagctcagacgtctctaaaaaatgtttcctttataaaagcacatggcggttgaatcttaaggttaaattttaatatgaaagatcctcatgaattaaatagttgatgcaatttttaacgttaattgatataaaaaaaaaaacaacaaaattaggcttgtaaaactgactttttcattacgtgggttttgaaatctagccccagacatactgtgttgagagatacttagagggagggagtaggttttgaagaggttgatggtggtggggagggaaggcctcctgaattgagtttgatgcagagctttttagccatgaagaatctttcagtcatagtactaataattaaattttcagtatttaaaaagacaaagtattttgtccatttgagattctgcactccatgaaaagttcacttggacgctggggccaaaagctgttgattttcttaagttgacggttgtcaatatatcgaactgttcccaagttagtcaagtatgtctcaacactagcatgatataaaaagggacactgcagctgaatgaaaaaggaatcaaaatccactttgtacataagttaaagtcctaattggatttgtaccgtcctcccattttgttctcggaagattaaatgctacatgtgtaagtctgcctaaataggtagcttaaacttatgtcaaaatgtctgcagcagtttgtcaataaagtttagtccttttttaatcaaagtaaatgtgatgaattgtcatttttttgggtggaccataaaatagttttctctttcaaataaacttaaattaactctaaagttaatgggcttgttaaaagttggaaacattcttaaaagtggtgggggggattttattttaagtttaccaaaaaaaaagttgatggagttgttaagttttagtttaaaaataaccaaagctttttcaccccctggaagttgttggaagctgttgtatccaatcctatcaaaaattctaatttatggagagttttcaactcaactgagctgaaacttggattggtttccatagataggtctcagtatttaaaagtgcaagccagcctggtttgcaccttctgtagaacccctaggtggctctaaagtgtgacaccaaataatttctgtgagctcagaaggggacagcatc

SEQ ID NO: 365 - DNA, 481 bp, Homo sapiens
  misc_feature: Incyte ID No: 001523.1
gattacaggtgtgagccaccactcctggccgtatcttggtatatctcactttactgggtgctaactgttgtccatgctacactggacatctcctgttttctcctccagatctactctccacccttccctcctgccttgtgctctgggaggctgactttcatggatggcacttttatggacacctctcacttctggttgctctttgccaataggagacacacagaagaaagatgtgtaagctgaaggaggagagtgagattgaagcatttatctcgccagcttctgcccggtgggcttgtcgtggttggctgaagccctctaccgaaggccacagctgttgtagacctgcgttttcccatatacttattctttttggggtctatgaaagttccagaaacttccatgtcactttgaccttgtagacctaggggtagaaatggctctctgctgtaataagctagccttaagataatgcatgttc

SEQ ID NO: 366 - DNA, 450 bp, Homo sapiens
  misc_feature: Incyte ID No: 239097.1
  unsure 21: a, t, c, g, or other
ttttaacttggccccacaacntggcaaattgtccctctatgaaatgcccctccattaacccacttgaatgtgtcatctgtgtcctgccagcgtcctgaatgtcacacatgtgatcttatttaattcttattgcagccaggaagagttttatattattaccacatagcacacttgagaaagcctcagggatgcgaaacaccttgcctgaagtgacatactttgtaaacgggagggcaggactccaagggaggccctctggctcagctctcctgccccttgctatgctgaactctgttggattacctctgcgagtctcacacgtatggtttcacagcccccttttcataaaaatacttggcaaacctcttgactttcttgaaatgaaattaataaattatacaatttatctaaacactctaatttccaataaaatacatatattaaaaaaaa

SEQ ID NO: 367 - DNA, 5134 bp, Homo sapiens
  misc_feature: Incyte ID No: 252747.27
ggcgtgcggcggagccgtgtcccgtcagaggggcgctggcgcggtggctgatgccgtccgggatcagcgcgagcacccagcccgcctcggccgggagggcagcgcggcactgcggggcgatgagcggcgcccggggcgagggcccggaggcgggcgccggcggggctgggggccgcgcggcgcctgagaaccccgggggcgtgctgagcgtggagctgcccgggctgctggcgcagctggcgcggagcttcgcgctgctgctgcccgtgtacgcgctgggctacctggggctcagcttcagctgggttctcctcgcgctcgcgctgctcgcctggtgtcgccgcagccgcggcctcaaggccctgcgcctgtgccgcgcgctggcgctgctggaagacgaggagcgcgtcgtgcgcctgggggtgcgcgcctgcgacctgcccgcctgggttcattttccagacactgaaagagcagaatggctaaataagactgtaaaacacatgtggcctttcatttgccaatttatagagaagttgtttcgagaaactatagaaccagccgtgcggggagcaaacacccaccttagcacctttagtttcacgaaggtcgacgtgggccagcagcccctcaggatcaatggtgttaaggtatacactgaaaatgtagacaaaaggcaaattattttggaccttcagattagttttgtaggaaattgtgagattgatttggagatcaaacgatatttttgtagagctggtgtgaaaagtatccagattcatggtaccatgcgggtgatcctggaaccgttgattggagatatgcccttagttggagctttgtctatcttcttccttaggaaaccacttttagaaattaactggacaggactgacgaatcttctggatgtccctggattgaatggtttatcagatactatcattttggatataatatcaaactatctggtgcttcccaatcgaatcaccgttccacttgtcagtgaagttcaaatagctcagttgcggtttcctgtaccaaagggtgttctaaggatacattttattgaagctcaggatcttcaggggaaagacacttaccttaagggacttgtcaagggaaagtcagacccctatggaatcattagagttggcaaccaaatcttccaaagcagagtcatcaaggagaacctcagtccaaagtggaatgaagtctatgaggctttagtgtatgaacatcctggacaagaattagagattgagctctttgatgaagacccagacaaggatgactttttaggaagtcttatgattgacctcattgaagttgaaaaggagcgccttttagatgaatggttcactctggacgaggttcccaaggggaagctacacttgagactggagtggctcacgttaatgccaaatgcgtcaaacctcgacaaggtgctaacagacatcaaagctgacaaagaccaagccaacgatggtctttcctctgcattgctgatcttgtacttggattcagcaaggaaccttccgtcagggaagaaaataagcagcaacccaaatcctgttgtccagatgtcagttgggcacaaggcccaggagagcaagattcgatacaaaaccaatgaacctgtgtgggaggaaaacttcactttcttcattcacaatcccaagcgccaggaccttgaagttgaggtcagagacgagcagcaccagtgttccctggggaacctgaaggtccccctcagccagctgctcaccagtgaggacatgactgtgagccagcgcttccagctcagtaactcgggtccaaacagcaccatcaagatgaagattgccctgcgggtgctccatctcgaaaagcgagaaaggcctccagaccaccaacactcagctcaagtcaaacgtccctctgtgtccaaagaggggaggaaaacatccatcaaatctcatatgtctgggtctccaggccctggtggcagcaacacagctccatccacaccagtcattgggggcagtgataagcctggtatggaagaaaaggcccagccccctgaggccggccctcaggggctgcacgacctgggcagaagctcctccagcctcctggcctccccaggccacatctcagtcaaggagccgacccccagcatcgcctcggacatctcgctgcccatcgccacccaggagctgcggcaaaggctgaggcagctggaaaacgggacgaccctgggacagtctccactggggcagatccagctgaccatccggcacagctcgcagagaaacaagcttatcgtggtcgtgcatgcctgcagaaacctcattgccttctctgaagacggctctgacccctatgtccgcatgtatttattaccagacaagaggcggtcaggaaggaggaaaacacacgtgtcaaagaaaacattaaatccagtgtttgatcaaagctttgatttcagtgtttcgttaccagaagtgcagaggagaacgctcgacgttgccgtgaagaacagtggcggcttcctgtccaaagacaaagggctccttggcaaagtattggttgctctggcatctgaagaacttgccaaaggctggacccagtggtatgacctcacggaagatgggacgaggcctcaggcgatgacatagccgcagcaggcaggaggtgtcctcttcagcgtagctctccacctctacccggaacacaccctctcacagacgtaccaatgttatttttataatttcatggatttagttatacataccttaatagttttataaaattgttgacatttcaggcaaatttggccaatattatcattgaattttctgtgttggatttcctctaggatttcgccagttcctacaacgtgcagtagggcggcggtagctcttgtgtctgtggactctgctcagctgtgtccgtaggagtcggatgtgtctgtgctttattatggccttgtttatatatcactgaggtatactatgccatgtaaatagactattttttataatctttacatgctggtttaaattcagaaggaaatagattaaggaaatatatatattttcttctaaaacttattaaattagtgtgacaaataatcattttcatcttggcagcaaaaagttctcagtgacctattttgtggtgtttctttttgaaaagaaaagctgaaatattattaaatgttagtatgtttctgcccattatgaaagatgaaataaagtattcaaaatattaacattttcataaatataagggatggtattattgagaagtaagttgaagggcttataaggaaaaatgttttataactgagtaatatattaagagaattgtcatggttcataaatcacattatgctaatctgaaatttcttacataaaaatgaagtgtcttatgtttattttaattgctgttgtaacttactcatgaaacagtatacagacaccttgtacttttcctcaactgtaagagcagactttcaatgttagcaattaagctgttgtcaaacaatcagtcatgagctttgttaattttcaatgttttcccagcctataaaaaaaggaaggtacacgttgtccttttaaaggttgtgaggtagattggagtgagtagacacggatattgcattaaaaattgaaagctcgatctcattattgtcaggaacccccagtgtgacctcacacataggatgtgggacctttgagccgatgtgcactgggccaccaccagggttgggggcgccacagctgcgagcccggcccctgctgttctcagcagccacttcccaggctgcctcactttatgccatgactgaccttaatattgggatattgttatgcaatttttatcctgtttagactgttaaaagcaggtttctgtacttaagagtcccccagacctcctgtgaggtgaggctctgttgcagtgtccgtaggctgtgtgtgtctgtaaagaaagaatgcacatatgtagacgattaagtgtatattataagctatatgctgaaaatggcttccatagccatgagaacatcttaaaactatgtgtaaatatattaaggaaagtatagctttgtaatttaaattggagcttttagcttgtttcatggaactatacaacttgtgggtaactcacatgaccaaacaaaccaaagtgcctgtgacggggcgggtggcgtctacccaccctcccttctagcagattcttattttgtttgaatttataaacaaggctggtggctgtctacccaccctcccttctagcagattttgattttgtttcaatttataacttacactttgaaccatgggtttacttataatggagtctgtagcttcacagcatatttcatgtaatcataaagaccagtatattccctcctgctgaatgacatgcgactgtaaagcctctttataaaccatttccaatgttagtatataggattatttgggaagcgtatcaatacctttatagacaaatacgaacatgtatgcacacaaaacatttaactatggtatttatggaagacaggtaacaacattaaatctagttgctttcccttagtattagatttgttgagggttttttaaaaatcaggtctgttgaaagtcttctgtcataatctataaagcagcagcactcatgggaaattgtaggcatgccagtaatttttaccaacatcccatacatctgagttctgcagttccagtgtgtaatccgctccatgtgtattttgcttaatggaatgctttatttaagcacttaggcagagtagacacaattaaaggtacaaagcccagaggaagtggtagagcagcaccgtgcctgccctgaggcagtggagtcagtagcgctgtccccagggccttgagtgcctggaggtgcttggcctcccagtagctgccctcccattctcttttaaaaaaagggggtgattgcgtgagactgaagtgcctcccagatgtggaggagtgaagccaccatcgaggccacactcagcactccaggatcccagcgatgtcagacactcttgagttgtcaaaacgttaattttcagttttaaataatcagtttatctaagaaaagggaattttaacttttctaccttgagccaagc

SEQ ID NO: 368 - DNA, 530 bp, Homo sapiens
  misc_feature: Incyte ID No: 482490.11
gaaggcaggctaccgttgtcactactactaatttatctgcagtatgagtagcagtaggtgacttcaccataactcacatcatctggatctcaaagagccactctgatgacgtaagtataatctggcagtatcgtgggaatcaggaccaccgtctttgctgtagcaatacccgggacctcagtttacatatctcctttatgtgtcgagaaagtgtatgtgtgggtggtaggagggccaggaaaaaaagctaaaatcactcaccgtgtgattgttcagcatgaactgtaccgcactaagcttcactagcttccttacgctactgtacccaatggagaggtcattgagaagctgtagtgtcttggaggtgattggttcacaacggccccagtacttcaaagttggtgatgctggaggacaaaaagaaaaaaaaaagcaggagacccttttgatttgctggtttccttgagggctgggagaagaagaaagtcattcatcaaaagtcaccacacatctgcaccaccaattcacag

SEQ ID NO: 369 - DNA, 5163 bp, Homo sapiens
  misc_feature: Incyte ID No: 1000084.27
  unsure 4653-4674: a, t, c, g, or other
aaggcccttcggggccggccaccctttcactacttctcccccggactccttggtagtctgttagtgggagatccttgttgccgtcccttcgcctccttcaccgccgcagaccccttcaagttctagtcatgcgtgagtgcatctccatccacgttggccagggctggtgtccagattgggcaatgcctgctgggagctctactgcctggaacacggcatccagcccgatggccagatgccaagtgacaagaccattgggggaggagatgattccttcaacaccttcttcagtgaaacgggtgctggcaagcatgtgccccgggcagtgtttgtagacttggaacccacagtcattgatgaagttcgcactggcacttaccgccagctcttccaccctgagcaactcatcacaggcaaggaagatgctgccaataactatgcccgagggcactacaccattggcaaggagatcattgacctcgtgttggaccgaattcgcaagctggctgaccagtgcaccggtcttcagggcttcttggttttccacagctttggtgggggaactggttctgggttcacctcgctgctcatggaacgtctctcagttgattatggcaagaagtccaagctggagttctccatttacccggcgccccaggtttccacagctgtagttgagccctacaactccatcctcaccacccacaccaccctggagcactctgattgtgccttcatggtagacaatgaggccatctatgacatctgtcgtagaaacctcgatatcgagcgcccaacctacactaaccttaaccgccttattagccagattgtgtcctccatcactgcttccctgagatttgatggagccctgaatgttgacctgacagaattccagaccaacctggtgccctacccccgcatccacttccctctggccacatatgcccctgtcatctctgctgagaaagcctaccatgaacagctttctgtagcagagatcaccaatgcttgctttgagccagccaaccagatggtgaaatgtgaccctcgccatggtaaatacatggcttgctgcctgttgtaccgtggtgacgtggttcccaaagatgtcaatgctgccattgccaccatcaaaaccaagcgcagcatccagtttgtggattggtgccccactggcttcaaggttggcatcaactaccagcctcccactgtggtgcctggtggagacctggccaaggtacagagagctgtgtgcatgctgagcaacaccacagccattgctgaggcctgggctcgcctggaccacaagtttgacctgatgtatgccaagcgtgcctttgttcactggtacgtgggtgaggggatggaggaaggcgagttttcagaggcccgtgaagatatggctgcccttgagaaggattatgaggaggttggtgtggattctgttgaaggagagggtgaggaagaaggagaggaatactaattatccattccttttggccctgcagcatgtcatgctcccagaatttcagcttcagcttaactgacagacgttaaagctttctggttagattgttttcacttggtgatcatgtcttttccatgtgtacctgtaatatttttccatcatatctcaaagtaaactttgtcgttgtttaaaaataaatatgtactacggaatatctcgaaaaactgcactagagacaaagacgtgatgttaatatcttttccccacaattattacggataaacagtagcaccaataaataaatgataacaaatattaaaattaaaaaaggagagagatttagtatgtagaattctctattttttcttgttttgtttttacatataaaaaacagaatagcaatgtctattttatcagaatcacatatatacataaacatatgtatatatatatacacacaaatacaagttgccaaatatatatatagtatgtagatgtatattgaaaccttatttcaaaggaatgtgtgctggggagccaggggatcggggagggcagagctgagtgttagcaaaattaaatatctgttcaagataagctagtgactgtcaccgatcagggagagagagattggaaacatgaattttatatacaaaaaccggtacaaataagagagcaagagagagcaaaagatacatctcataaatagttgaaattaaatattaaccaagaatactgaaaaaaaaaccctactctttaattaaattaactgttttaatttctaattaaaaagggatattaaataagtaccgtatataaaacactttctcttttctctgcctccacaatgggcacgtggatcctgccctgtctctctggtccttcccttcccttcccgaggcacagagagacagggcaggatccacgtgcccattgtggagggaagggaaggaccaggggatggaggaaggtcaaccactcacacacacacaaccaggtctcctggggggacagaactagtggtttcaatggtgtgaggacataggtccttttaggctgcatcccaggaaggggagcaggaagaggatgagggcgagtcccaggaaggggagctgtcatgggctgcttcttccaacaatgtgtctcttctcttcgccgggacatctgccagtggtctcctgggcaactcagaagcaggtgagagtaagcgaaggccgcccaggctcctgaatcttccaggcagtgcccctgggggcgagatgcgcgtgcagcatgtggagggaatccccaaagcacagcaatgtcctgaagctccccaaactcctggtcagagccggtgtcctcatccctgtacctgtgatctgtctttctgtccgtctgacctggggtagagaggctcagcgccagggctgggtttgtcggtgttcccaaaactgggtcatatttgcccccatgccctggccttgcacattcctgggcaggggagaggaccctggccccaccaagtgggacaaaaaaaagatcatgccagagtctctcatctcctcctcttccctgtcaggatctgagtgggaacattcccctcccaactcaagtccacagcagtcaaatacatccagtgaagacaccaataacattagcactgttaatttaaaaaaagaatatatatattttatatatataaaatagagatatttatttttatatatatataatatatatatatataaatgtatgtatgtgggtgggtgtgtctacaggaatcccagaaataaaactctctaatcttccgggctcggtgatttagcagcaagaaaaataaaatggcgaatccaattccaagagggaccgtgctgggtcacccgcccgggaatgcttccgccggagtctcgccctccggacccaaagtgctctgcgcagagtctcctcttccttcatttcaggtttctggattaaggactgttctgtcgatggtgatggtgtggtggcggcagcgtggtttctgtatcgatcgttctgtatcagtctttcctggtgagagatctggttcccgaaaccctgagggaggctccttcctcctgcccggctcaccgcctcggcttgtcacatctgcaagtacgttcgtttaactcaagctgcctcgccttgcaacgcgagtctgtgtttttgcaggaacatttacacgtctgcggatcttgtacaaacaaatgctttctccgctctgagcaaggcccacagggattttcttgtcttgctctatctttctttggtctgcattcacatttgttgtgctgtaggaagctcatctctcctatgtgctggccttggtgaggtttgatccgcataatctgcatggtgatgttggactcctcagtgggcacacactccaggccctcgtcattgcagcagcccccgcatcgcatcaggggcacacaggatggcttgaagatgtactcgatctcatcagggtactcctggaagatgtccaccagggtctcgattggatggcagtagctgcgctgatagacatccatgaacttcaccacttcgtgatgattctgccctcctccttctgccatgggtgcagcctgggaccacttggcatggtggaggtagagcagcaaggcaaggctccaatgcacccaagacagcagaaagttcatggtttcggaggcccgaccggggccggcgcggctcgcgctccctctccggctcgggctgtggggcggcccgctctcctcggcgcctcggcgagctactcttcctccccggcccgaggcccgggccagggcctggggagcgcgcgcggctggagcactgtctgcgcacaccgccgcctcacccgtccatgagcccggcttccgagcgccgagtcgccactgcggccccctctcctcttccttctcttcttcctcctccccctcctccggctgcggctcctcccggcccgagctagcacttctcgcggctccgctcggctcggcttcccccgcgcggaccacggctcctccgaagcgagaacagcccagaagttggacgaaaagtttcagtgcgacgccgcgagccccgaccccctccaccccgcctccgggcgcgggctccggcccctgcccgcggctcgccgccgcgtccactgtccgccgccggccggggaggaggtggtagctggggctgggggcggnnnnnnnnnnnnnnnnnnnnnncgcgactggtcagctgcgggatcccaagggggagggctcacgccgcgctccggcggtcacccccaaaagcaggtcactcactttgcccctgtcgctttcgctgctcgcacgcccgcgcgctctctctgaccccgtctctctcttcctcgacttctctctggagctcttgctacctctttcctctttctgctggtttccaaaatccacagtgatttggggaagtagagcaatctccccaagccgtcggcccgattcaagtggggaatggcaagcaaaaataaattaaaacgagaaacaatacagttttaaaaaaaaatgtttaagaaaaaagaagagggataaaacccggatcaatgaatatcaaattccagcaccgagcgccctggccggtgagtccgctgaccggtccacctaaccgctgcgcctcccgacagagcgctggtgctagcccccagcgccacgacctccgagctacccggctgccccaag

SEQ ID NO: 370 - DNA, 3473 bp, Homo sapiens
  misc_feature: Incyte ID No: 205607.5
gactacgctcagctggttcatttatgttgtttttcctgtacctaagttcccgctgtaggtggtacctttgcagacggtgcgatgggggaagcagagaagtttcactacatctatagttgtgacctggatatcaacgtccagcttaagataggaagcttggaagggaagagagaacaaaagagttataaagctgtcctggaagacccaatgttgaagttctcaggactatatcaagagacatgctctgatctttatgttacttgtcaagtttttgcagaagggaagcctttggccttgccagtgagaacatcctacaaagcatttagtacaagatggaactggaatgaatggctgaaactaccagtaaaataccctgacctgcccaggaatgcccaagtggccctcaccatatgggatgtgtatggtcccggaaaagcagtgcctgtaggaggaacaacggtttcgctctttggaaaatacggcatgtttcgccaagggatgcatgacttgaaagtctggcctaatgtagaagcagatggatcagaacccacaaaaactcctggcagaacaagtagcactctctcagaagatcagatgagccgtcttgccaagctcaccaaagctcatcgacaaggacacatggtgaaagtagattggctggatagattgacatttagagaaatagaaatgataaatgagagtgaaaaacgaagttctaatttcatgtacctgatggttgaatttcgatgtgtcaagtgtgatgataaggaatatggtattgtttattatgaaaaggacggtgatgaatcatctccaaatttaacaagttttgaattagtgaaagttcctgacccccagatgtctatggagaatttagttgagagcaaacaccacaagcttgcccggagtttaagaagtggaccttctgaccacgatctgaaaccctatccttccccgagagatcagttaaaaaatattgtgagttatcctccatccaagccacccacatatgaagaacaagatcttgtttgggagtttagatattatcttacgaatcaagataaagccttgaccaaaatcctgacatctgttatttgggatctacctcagggggccaaacaggccttggcacttctggggaaatggaacccgatggatgtagaggactccttggagctgatatcctctcattacaccaacccaactgtgaggcgttatgctgttgcccggttgcgacaggccgatgatgaggatttgttgatgtacctattacaattggtccaggctctcaaatatgaaaattttgatgatataaagaatggattggaacctaccaagaaggatagtcagagttcagtgtcagaaaatgtgtcaaattctggaataaattctgcagaaatagatagctcccaaattataaccagcccccttccttcagtctcttcacctcctcctgcatcaaaaacaaaagaagttccagatggcgaaaatctggaacaagatctctgtaccttcttgatatcgagagcctgcaaaaactcaacactggctaattatttatactggtatgtgatagtggaatgtgaagatcaagatactcagcagagagatccaaagacccatgagatgtacttgaacgtaatgagaagattcagccaagcattgttgaagggtgataagtctgtcagagttatgcgttctttgctggctgcacaacagacatttgtagatcggttggtgcatctaatgaaggcagtacaacgcgaaagtggaaatcgtaagaaaaagaatgagagactacaggcattgcttggagataatgaaaagatgaatttgtcagatgtggaacttatcccgttgcctttagaaccccaagtgaaaattagaggaataattccggaaacagctacactgtttaaaagtgcccttatgcctgcacagttgttttttaagacggaagatggaggcaaatatccagttatatttaagcatggagatgatttacgtcaagatcaacttattcttcaaatcatttcactcatggacaagctgttacggaaagaaaatctggacttgaaattgacaccttataaggtgttagccaccagtacaaaacatggcttcatgcagtttatccagtcagttcctgtggctgaagttcttgatacagagggaagcattcagaacttttttagaaaatatgcaccaagtgagaatgggccaaatgggattagtgctgaggtcatggacacttacgttaaaagctgtgctggatattgcgtgatcacctatatacttggagttggagacaggcacctggataaccttttgctaacaaaaacaggcaaactcttccacatagactttggatatattttgggtcgggatccaaagcctcttcctccaccaatgaagctgaataaagaaatggtagaaggaatggggggcacacagagtgagcagtaccaagagttccgtaaacagtgttacacggctttcctccacctgcgaaggtattctaatctgattttgaacttgttttccttgatggttgatgcaaacattccagatattgcacttgaaccagataaaactgtgaaaaaggttcaggataaattccgcttagacctgtcggatgaagaggctgtgcattacatgcagagtctgattgatgagagtgtccatgctctttttgctgcagtggtggaacagattcacaagtttgcccagtactggagaaaatgaaactgggattgacccatcaagatgcttggctcaataagaaaaccacgttaggagcaacctttgtatattggagacttcagagtaaccagcaaggaagagaaatcttaatcttcaagttaccatattttccaaatattacatggtacctgagttctgcttccttggatgtcattgcttaaatatagtcttgaagggcttgttttgaaatattgtatatattttttcaaatgtatacattgttaataaattaagaaatgagaaacattcttatttatgtacatgttatgagagttctggaggaagtaatatgttgaaatagtaaaacattttagtttttgagtttaaaatgttattttttcctcttatatcttcatatcaggacagcagtaacctgaatttagattgtcacagtttacaagtttttgtttgttccttctttcctctctcttctcccactcacttttgtgtgttgtttgtttttgcctaatttacatgtttaaagttctacttaaaatttttcttcaagttttacatgtgatggctcattcttctgcagttcaagaattgcttatatttttagaagatactcattttctcttacaaataattaattttttgtaaactacagttaatagttcttctagcttgtaagtgtgtaaagtagaatatgaaaaatgtggctatttagataactggccaaaaggtcatatgaccaccagttttagtat

SEQ ID NO: 371 - DNA, 1198 bp, Homo sapiens
  misc_feature: Incyte ID No: 1089426.1
  unsure 802-873: a, t, c, g, or other
gttagctacattcttttttactatacttgctttctttattaagttctacattttgtcctacattaatatgaatcatttgaagtactttattctaatttaaatttgaaaatactattttctgaaaaaatgtattttattttggaagctcttcatttttaaaaatttgtggtttatattctgagcaaattaaaagtagctgttttggccatttaaaaatgttaaaagaatatgagtgcattaagagatataatgaccactataactattacttgacctgtttttatattcactacctaacatttatttaatgcctgctaaatacaaggcagtataattgagccagtttgtgtgatagaatatatatttgattctttaaatttttgttttttttattataacagtgtgctcagtttaaactgtgaaacaaagacaagaacagctgccatcattttaagataactgaagttagaaatgtgataatggttgttttaaaatctttacctctgcaattacctataaggccttttaagatcctgtaatgatctgcctacccacaccacttcttaaacctctctggccttgttttttattactctttctcttagtcaccttgctctatccatactgaccatcctctttttgtttgtgctgtcagcagcatcttccatgaatgtcccttagatgtcctcatgttttagtttcctcttcacaagcacttttctgctcttctctgctttatttttcacttttcaacattctaaatattgtattcattcaaaatacttaattatcttgtttgtcnnnnnnnnnnnnnnnnnnnnnnnnnnnnnnnnnnnnnnnnnnnnnnnnnnnnnnnnnnnnnnnnnnnnnnnngttcacactgattgtgatggtgtactttttttaaaaaacagaatcatgcaaacatattactctaatacttgctttcccctctcttagtaactgatggatattgtcatttgatagtgattttaaataactgcagaatagtccataataagtttgtttccagttttttgtcacgacaaataatattgtaataaacacccttatacatattttttaaatattttgctccttttatttttatgaaataagttccttcatgtgggtcaacatatagtagtccctttatttgtggttttgctttccctatggtctgaaaatattaaatgga

SEQ ID NO: 372 - DNA, 726 bp, Homo sapiens
  misc_feature: Incyte ID No: 335186.2
  unsure 561, 602, 607, 620, 636: a, t, c, g, or other
gccgagcccaggccggttccggcgaagttaaaccctcggagctgggcctcggactgctggggccgttaccccttcggccacccccgctgaccatggcagtgtttcatgacgaggtggaaatcgaggacttccaatatgacgaggactcggagacgtatttctatccctgcccatgtggagataacttctccatcaccaaggaagatttggagaatggggaagacgtggcaacgtgtcctagctgctctctcattataaaagtgatttatgacaaagatcagtttgtgtgtggagaaacagtcccagccccttcagccaacaaagaattagttaaatgctgaagaagccttcaggaatccaaatcctgaacatttggaatgagcccagatagaaatatcgaatgcaaagctactggcttcacagagacaaccatttatgatttgctgttctgtaagagtgtggattctttctatcaactgctgatatcatcttcaggaagcaagtccataacatgacatatctggattttgtgcttagaaccttaaattggaagcattcttnattatgcatctaaatttaaaggaggtaattttaaaccagtncttcnttccctttggttnaccatttcaatacctnaaccaaattactttggtatctgacaacagcatcatctacctcagtcattaggatttcttaataaaaaagagattgtatttttgaaaaaaa

SEQ ID NO: 373 - DNA, 744 bp, Homo sapiens
  misc_feature: Incyte ID No: 357276.8
  unsure 18: a, t, c, g, or other
caagagagcacagccctngccatggtgccagggcccgtgcaatgcagcgggcttccaccatcgacgtggcggccgacatgctgggcctctctctggcaggaaatatacaagacccagatgagcccattttagaatttagcttagcttgcagtgagctgcatactccatcgctagatcgaaagccaaatagttttgttgtggcacagaggcaagcagctcctctcttctgtaggagctttgggttttcagaggtgcagggaaggcagttttacaggttaccgtaaaacagaggttccgtccagtgttccttatgatgcctccccatttaaaaagaaaagagatctatggaaaactgggaatgtaatgtggattctgtcagagctcctacagagcacagttgcctttagtttcctttaaagatgtaaaaatattgtataatacagttttgtccctacacaattgtatttgccaagcttagtgcattatgatacctttatttatttgttttgggcagtattactatatatatataaacatacagttactgttttatatattcttaggtcattcaaagccatgtatgctgtaaatgtgctagtcttagaatgacacataataaataactgacaagatattaaatgtggtcttgcctgattcatcctattaggaggactagttctatgtgaccagcctgtgactggaccatggtcttgggcattgcatgagtgctcgggtgcgaataca

SEQ ID NO: 374 - DNA, 4349 bp, Homo sapiens
  misc_feature: Incyte ID No: 474724.5
atataaaatagtattccaaataagtacattttatagcaaaattatgcatttttcctaagactttcatcaccaatatcgccttataccctgcttttgttgggtctcaccatggagcggaaagtgcttgcgctccaggcccgaaagaaaaggaccaaggccaagaaggacaaagcccaaaggaaatctgaaactcagcaccgaggctctgctccccactctgagagtgatctaccagagcaggaagaggagattctgggatctgatgatgatgagcaagaagatcctaatgattattgtaaaggaggttatcatcttgtgaaaattggagatctattcaatgggagataccatgtgatccgaaagttaggctggggacacttttcaacagtatggttatcatgggatattcaggggaagaaatttgtggcaatgaaagtagttaaaagtgctgaacattacactgaaacagcactagatgaaatccggttgctgaagtcagttcgcaattcagaccctaatgatccaaatagagaaatggttgttcaactactagatgactttaaaatatcaggagttaatggaacacatatctgcatggtatttgaagttttggggcatcatctgctcaagtggatcatcaaatccaattatcaggggcttccactgccttgtgtcaaaaaaattattcagcaagtgttacagggtcttgattatttacataccaagtgccgtatcatccacactgacattaaaccagagaacatcttattgtcagtgaatgagcagtacattcggaggctggctgcagaagcaacagaatggcagcgatctggagctcctccgccttccggatctgcagtcagtactgctccccagcctaaaccagctgacaaaatgtcaaagaataagaagaagaaattgaagaagaagcagaagcgccaggcagaattactagagaagcgaatgcaggaaattgaggaaatggagaaagagtcgggccctgggcaaaaaagaccaaacaagcaagaagaatcagagagtcctgttgaaagacccttgaaagagaacccacctaataaaatgacccaagaaaaacttgaagagtcaagtaccattggccaggatcaaacgcttatggaacgtgatacagagggtggtgcagcagaaattaattgcaatggagtgattgaagtcattaattatactcagaacagtaataatgaaacattgagacataaagaggatctacataatgctaatgactgtgatgtccaaaatttgaatcaggaatctagtttcctaagctcccaaaatggagacagcagcacatctcaagaaacagactcttgtacacctataacatctgaggtgtcagacaccatggtgtgccagtcttcctcaactgtaggtcagtcattcagtgaacaacacattagccaacttcaagaaagcattcgggcagagataccctgtgaagatgaacaagagcaagaacataacggaccactggacaacaaaggaaaatccacggctggaaattttcttgttaatccccttgagccaaaaaatgcagaaaagctcaaggtgaagattgctgaccttggaaatgcttgttgggtgcacaaacatttcactgaagatattcaaacaaggcaatatcgttccttggaagttctaatcggatctggctataatacccctgctgacatttggagcacggcatgcatggcctttgaactggccacaggtgactatttgtttgaacctcattcaggggaagagtacactcgagatgaagatcacattgcattgatcatagaacttctggggaaggtgcctcgcaagctcattgtggcaggaaaatattccaaggaatttttcaccaaaaaaggtgacctgaaacatatcacgaagctgaaaccttggggcctttttgaggttctagtggagaagtatgagtggtcgcaggaagaggcagctggcttcacagatttcttactgcccatgttggagctgatccctgagaagagagccactgccgccgagtgtctccggcacccttggcttaactcctaagcccctgcccagcaccacagcagagatcacacactgaccctccgcccttccccttcaagcattttcctcttcccttttcagggtgaagctcttccttcaagagtttctagatcttgttttttttttaatccaacatgttcatttgggtttgcttacttgaccctgtggagatccccacagccattgggcatcctaggtgaatttggccttggttgggctctgccaaagactaatggactaaaatgtgaaacagcctcttgccctgtacctttccttcccattaggacatcctttaaattataagcatcctttttgaaaagagctatgaaggtgtatgagcccatccttttattcattgactctaagagtcaaattttctagtgcatatcctattgccagcataaggatgaggagggggaaagggtcttaattctatgtacagcagagacattaaacttgctgtgtccgggctgcatcatcttcctggactgtttctgttgttctctgtgttcacattttttcctgcaacttttaagctactgtcttttttaaatagctatatgaacaccaaatttgggtaccattttatcactgttcaaagcactgtcaaattcctttcatcctttaatagttaagatctttgaatcttcagtctgatttttaatgtaagcaaaaacagaaccattgaatagtaatttcttgagaacctcaggtgttctataaacagtcctttcctgtatgtcttctattaccctaagaccagagttattttggttggttgttttgttttattttttgtttttgtatccatggctggcactttactcattgcacttgagtttattgccccataactaaaggatcaggatgatggtagaacggagatctgggtttcagagctttcccatttaagaaaaatagatcttgagattctgattcttttccaaacagtcccctgctttcatgtacagctttttctttaccttacccaaaattctggccttgaagcagttttcctctatggctttgcctttctgattttctcagaggctcgagtctttaatataaccccaaatgaaagaaccaaggggaggggtgggatggcacttttttttgttggtcttgttttgttttgttttttggttggttggttcgttattttttaagattagccattctctgctgctatttccctacataatgtcaatttttaaccataattttgacatgattgagatgtacttgaggcttttttgttttaattgagaaaagactttgcaattttttttttaggatgagcctctcctagacttgacctagaatattacatattcctccagtaagtaatactgaagagcaaaagagaggcaggattggggtcacagccgcttcttcagcatggaccaagtgggccttggggattgcagcgttctcgaagtggctgtaggactcgaatttacagaaagccacagaggtgcaacttgaggctctgctagcaagccaccagtgaggctattgggtaaccacctttctatacaggagattggaatctactttgtcatttatccaccacagtgacaaaggaaaagtggtgccgttatgcaatccatttaactcataaacatattactctgagtaactggccagccattcatcggatccttcattgggtactcctgaaatcagacatgttcctgtagaaagaattttaagttaggctttctatgcacctatcaagaatcaagagaatagattgtatcaaacaacggcagggaaatccttcagcaattctaatccactttgggttttcagctgtttttacatctaaagcaatagactagaactgaattatcttctacatagtaaaatcacaattgtggaattacaggaattctggtgatattaaggtgaaataacaaaacacaaaaggccctattttaacagttgatgtgacagtaagttttaatagaacctgtaacttcattttggaaatgcttctccaccaaataagggctttttcccctatttaaggagccagatggattgaaagatgtggaaataggcagctgtagatcttgatcttccaggtaccccatgtacctttattgagcttaattataatactgtcaaattgccacgatctcactaaaggatttctatttgctgtcagttaaaaataaagccctaaatacatttttattctttctactgagggcattgtctgttttctttgtaaatgccgtacaataaacaaattatttaataacctaaaa

SEQ ID NO: 375 - DNA, 2106 bp, Homo sapiens
  misc_feature: Incyte ID No: 230889.3
cttgatgctctctgggctttgttgaggcggcagtatgaccgggtttctttgatgcgacctcaggaaggagatgagggccggtgcataaacttctcccgagttccatctcagtaaatgggaagcaggaagaccaagaagaaaaaccaccatcgtgtcacgtcgacgatgccaaattatgttagcgtgagcagaaacaccgtgggggaggaaggcagcagctgaagaaaaaagctcaaatgatctagtcactttcgatactgtacttcagatgcgaaatggatattcgagtggaaacctgacaaagtgcgcctgctttgatgtgaactggtatagacaatgaccagtggctgggtcagtgggatgtctctctgtgagcacaaaggcttatcaaatgacactaaagataagttcaacaaccatcacattggaagggagaaggcgaacatttcatgtttggcgggcatgtgagtgcacaagatggaaagagcgattggagcatcctggtataattacccccattgtgctcttaatggaaatttcaaaggacgggagtattctgttggttggtgtccaggtttgtggcactgttccaagaggccttacacacacacacaaatatataattttctatacatatatatcctctagcttgaaacttttgctcaagtttatttatgtcactggctggctggatccaaagtcatgtgtccacacattcataaataaaaattttacctatgcctgtgctaccatttctttaagcccacataaagctaatgccttcttgggttgaatatgcagttgttatgcttagtttcagggatggaattctattcagttccaaaatgtccctcatgttcacagatgatactattggcagtagctgcatatgcaagtgtaacttggaagcctgatatagtatacccaaccctttctgcaatgagttattgtatccctttgttctgcatttgcatctggaacaagacctaatgtggcttccttaaatgggcacttcatttctgatgagtgcacaccaattattgctattttaatatcattgagaatactacagaagctaaggctatgtttctttggtaactacttcaaatttctctagaattatgtagcatacttacattttgctgcatgaacaatgaaaattaacctctgcctttaaatggaaaaataactttctgtagattgttatacagctactatgaagagctcttaatgaagaggaagtggcagtggtctatatgtagactgaaaaaatatcattaataaagttcaaagactgatggaatttcattgcccttaaagatatgaaccagatctgttttatgcttttctccaattatactaactagcagttgaaaagaatttgttttgaagagtgttattttcttaccaaaagaccagatcaaaaatccctatacttttccaccaaaaaaagattaaaatgaagccatttctataaatttaatggcactttatattttatatagagaaatagcttctgtttgattttctggacaccatgtcagtcaagatctactttctgtgtaaaaatgaataagtcttgcacataatccattcgtgttgcataaggttgcaaaaacaattaagtgggaaatgactcctaacttatgtgtctactctgcctagaaagaaagttttgaaggcatctatatatatttcataacaatgtctgttctttatggatttgatccataaatatttatctatctgaaaactttgatacttggaatgttttccttagagcatttggtgctccaagaaaaaacatttggtgctaagagttgcagcactgatgcctttccctaagttaattctattttaaaaatttatatttccttcccaatgagatgcagagtaaaatttgagaccctccattgactagggagcagcatctgtcatctatggttaattactattttgacaaaaatatagaaggtttaaacccccatgtatttcagattgttagagaaagaagtagtttgcttatatttcccttgaactttattctaaccatttaaataataaattattcaatatttgttataataaatccttactagatacaag

SEQ ID NO: 376 - DNA, 1645 bp, Homo sapiens
  misc_feature: Incyte ID No: 903909.1
  unsure 746-783: a, t, c, g, or other
ggggaattaagcaactgagaaaatgcctcttggtgccccgacccccagggttcgtctaggtcccagagaccctctgcctggaggcgggccttccccagggctacatctgcacgccccgtggtgtcaccctcagccggcgccgggcaccctggacagtgcggtgggcgatggcccaggtgggtggccgcgacggtggcctcctgcagagctgggacccggtcctacattcgtgattttgttttctcccaagtcagaaaaatgttgagggtattagacatccctgaaactcagttaaccgaatttccagtctccaaagcggaagggtaggcatcgccaggcgctggtgagccctggtcaatgagcgcttccatggaaaccgctcggctgattacattttttctgtgtattatttgaatagagagtaaagctcctccgctgtttcgtaaccatatcctttcccccgctaactggaggctgatttctacatatttcttccatgtatctgagaatatctaactagaaggatgagaaggaaataaaatgttataatcagataaggctggttataaaagagtaatgtattacctcaatttttgactgactttgtaaaagccaataactggtttaatgtttatcttgatagactttaaatgtatcaagtcttaattgtattttaaattgaagccttacatttttaaaacagattttgtatttttcttgtggaggtctttgctctaataacacannnnnnnnnnnnnnnnnnnnnnnnnnnnnnnnnnnnnnaggcacacatttagttagatgtgaagcatttaattcattgggagctaggtcagctgccagatgagttgcaaaaacagaaaaaaacctacccattgaataacttctttgaatttggagataagttttcttttacttaaaatgaatatattaattctagaggggcaaaactagcaatgcttatgcaagtgacggtgctgctcttgttccacccccacccagatggtctctgagtgcgccgtcctgggcagggcacacggtctggagctgagagggtggagcaagagtgcactgactccgagccgagggcaggagtggctcaacttggtctcgtcttgcacttagtgcaaataccaataattaagatgcctagacttctgcccttggtcacagtaacaacaacattttgaagacttttccctggtggcatcctagagggaccgactttctgcagcctctgtcttccaagctgagcttctgctgcagtgtggctgtcactgcacctgtgtgtctccctgacgtccctgtcagctgcttcattttgatttcctttcttctcccgccctttctgtaggctctgtcccagcatctcctgttcttaactggccacaatacaacactaagcgcatttttagtaatttgtatttattaaatagagtttgtgggccttgttctctactttaaaagcagatgagtggaacatttatgtttccctggtcaatgagcctcaataaaaaacaaacagaaaaaaggttttacacgtgacacatgatatcttttcattgctgttaaggacattttgagaaagttttctaagtcgctatgctccaatttcttaatgcttaaataaaagagaaattcagtg

SEQ ID NO: 377 - DNA, 3220 bp, Homo sapiens
  misc_feature: Incyte ID No: 229298.10
  unsure 353-408: a, t, c, g, or other
tctcccttctccctatgcccccttctggtttcacgcccttttcctctttgaagagtcaagtacacttcagacaacactgctttctcctgtccccaagccacaaaggcacaggaaagaaagaaagcttcagaccgctattaagggctctcagaagaagagaaatcaccccctagccccacggggaaagagaaaccccctttcttagggaacgcccacgatttattatcccgattaatttggataagtcccttttaagaaaaaaaaaaagagaatgtgaaacaacacacaaaaaatagaaaactcttttcttgagtgtggatgagaatgggcacgctcacacttctggccaggannnnnnnnnnnnnnnnnnnnnnnnnnnnnnnnnnnnnnnnnnnnnnnnnnnnnnnnacgcgtgtgcattgaggagagagagactgaacagagagtactttgctgctaacgaatccatcttggactaaattctgacaaggcctcagtttccccagttgtgcagggagtaggtcagacagggttttcactgtctagatttagctggttagattttcctctaaaatcttaagcagatgctgaatccataaagccaaggagtgctgagggctggagtgggtgggccctccctcccacagccccagggagatacatctggactcctgggaatctggattaagaaagttgggatgaaagaggaggactgctcaggccagttgtgagccagggagaatgttccagtctggttttggtctggtggctcctagaaagggatgtggcccagaagtgggactcaaacagagagatgaagtaggggaggggagtcctccacgggcatctctctcctggcggctggatagctttaccctagggtggggccagccctgacaccctcatcccctcctcagcccagcagcctctagagcagcgtggtgctctcttgatggccaggaatccagaatctgcccttccccaaccttggtttctccttctgtaaagcagagtgatggctgagaagtcctctctagctgcagaagcctgagcttcccggtgtcagtcagctctgcaacgtgggagccttggaggcgggtggcctggctgtgcttcatatgcccaggagtggagaaggaggctgagaagctggtttcccagctctgatctccacaggcacctcctataaccctcctctcacccaccccgctacggtctgagagatctgaaataacctttcccagtgggcagggttgccagggttgaggggacagcacataccacccccacccaacctgttcgaggggccctgcatggcacgggatgagtccctgccctgtgcagctgcctggcagtggctgggacaaggatcttgcagccagcacagaggcctcttcaaaggcctctccctcttggcactccaggcaaggcaggtgcccgcttccccaacacctccaggcagtgaccctagggcatgccccagcaggtctccgagcagccactgggacccgtctcagcacatcctggcctttgaaagtctgatatcctgagaggagggcaggttttagggccgcagttccagccagcgtccccagcctggcttccctgccatggactcagtagctcgtggggcttcttaccacccaccagccccgctggggtgcggcctggctgtgggcaaaggaggacttgcctggagatttgagagaagattccttctaccagggctgctgaggggccaggcctgcatcaggggctaggctctggctgggcccggaggctgagactaaggctttcgaccctggtgcctccatgtggatgctgcctcagacaaaggcagtgagccttccctgccaaagtgcccatcccatgggctcggcctcactggtcactgttagcccatgaacacgtgtgggcctcggtcacgtggctttgagggcagtctgaccaggctagaccacacgtgccgtgacagggggtgccattcccctcgcaggctctaatgtgcccacatgtagcctggcagtccaaagaccaagaatcaacttgcaaatctgccattaaactgctgtgcgacttcaggcatatcactgccttctctgggcttcagtgtccttttcatacctagaagtctgcggtctgaggctctttgggttcagacacactggttctaggcttctgtaggggaccttgtgatctgccgtgcccctcctccctgttcttttctgtcctccccaccccaccctcagaagctgcttgctctgcccccaggacaggagcttgacggatgaagtgcagccagccacccaggtgccatttccagtctgacttccagaaatgtgcaccatgtcctagagcacagacccgttggctggagcctcctgggagggttcaaaccatcagctctatgagaaatgcccagaaaggctttgccgactccatccgtctgtggaggctgcctgcctccggggtgggatgggtggtttctcctccaattcagacccaagaggtagcccccgagggcatgtacctggtgggaagcagctcaggtacccttgggggttgcagggcccttacgcaggtatttgtctctctctctcctctctggggtgcgtgtgtgcgtgcgcgtgtgcgtgcctatgcttttctctgtgggcacatcaggatgcccctcggagagcatgtgcacgtgtccccacctgagcgagcgtgtgtgtgtgctcctctgcgtcccaggtttggacgtctagggtttggtgtgcctgtcttctgccctccctgagcccacagggtcagtcaatgtatcttctacgtgcctctccctctgccttctctcacagtgcccccggctccagagctcaggggtaggggttctcctgagggtgcaggggatccttctcatctcctggaccctccagggcactctggtccctattccccagctcctaggcagctgagccgggtcccttaggggaggtgaccaggagctttggtgcagggagctcttggtggggcaaagggctggacccctgccaggtctgtggacatggttatatgcccgggagaggggggtgcagggccccagggatggcccccaatcccacctctgtttattctgtaaactgcaacctataaataacctttagcattcctattgtaacaaaattaatttttatgaaataaattatatttcctagtctaataaaaaaaaaaaaaaggg

SEQ ID NO: 378 - DNA, 2215 bp, Homo sapiens
  misc_feature: Incyte ID No: 229298.2
gcccagaagtgggactcaaacagagagatgaagtaggggaggggagtcctccacgggcatctctctcctggcggctggatagctttacccctcctcagcccagcagcctctagagcagcgtggtgctctcttgatggccaggaatccagaatctgcccttccccaaccttggtttctccttctgtaaagcagagtgatggctgagaagtcctctctagctgcagaagcctgagcttcccggtgtcagtcagctctgcaacgtgggagccttggaggcgggtggcctggctgtgcttcatatgcccaggagtggagaaggaggctgagaagctggtttcccagctctgatctccacaggcacctcctataaccctcctctcacccaccccgctacggtctgagagatctgaaataacctttcccagtgggcagggttgccagggttgaggggacagcacataccacccccacccaacctgttcgaggggccctgcatggcacgggatgagtccctgccctgtgcagctgcctggcagtggctgggacaaggatcttgcagccagcacagaggcctcttcaaaggcctctccctcttggcactccaggcaaggcaggtgcccgcttccccaacacctccaggcagtgaccctagggcatgccccagcaggtctccgagcagccactgggacccgtctcagcacatcctggcctttgaaagtctgatatcctgagaggagggcaggttttagggccgcagttccagccagcgtccccagcctggcttccctgccatggactcagtagctcgtggggcttcttaccacccaccagccccgctggggtgcggcctggctgtgggcaaaggaggacttgcctggagatttgagagaagattccttctaccagggctgctgaggggccaggcctgcatcaggggctaggctctggctgggcccggaggctgagactaaggctttcgaccctggtgcctccatgtggatgctgcctcagacaaaggcagtgagccttccctgccaaagtgcccatcccatgggctcggcctcactggtcactgttagcccatgaacacgtgtgggcctcggtcacgtggctttgagggcagtctgaccaggctagaccacacgtgccgtgacagggggtgccattcccctcgcaggctctaatgtgcccacatgtagcctggcagtccaaagaccaagaatcaacttgcaaatctgccattaaactgctgtgcgacttcaggcatatcactgccttctctgggcttcagtgtccttttcatacctagaagtctgcggtctgaggctctttgggttcagacacactgttctaggcttctgtaggggaccttgtgatctgccgtgcccctcctccctgttcttttctgtcctccccaccccaccctcagaagctgcttgctctgcccccaggacaggagcttgacggatgaggtgcagccagccacccaggtgccatttccagtctgacttccagaaatgtgcaccatgtcctagagcacagacccattggctggagcctcctgggagggttcaaaccatcagctctatgagaaatgcccagaaaggctttgccgactccatccgtctgtggaggctgcctgcctccggggtgggatgggtggtttctcctccaattcagacccaagaggtagcccccgagggcatgtacctggtgggaagcagctcaggtacccttgggggttgcagggcccttacgcaggtatttctctctctctcctctctggggtgcgtgtgtgcgtgcgcgtgtgcttgcctatgcttttctctgtgggcacatcaggatgcccctcggagagcatgtgcacgtgtccccacctgagcgagcgtgtgtgtgtgctcctctgcgtccccggtttggacgtctagggtttggtgtgcctgtcttctgccctccctgagcccacagggtcagtcaatgtatcttctacgtgcctctccctctgccttctctcacagtgcccccggctccagagctcaggggtaggggttctcctgagggtgcaggggatccttctcatctcctggaccctccagggcactctggcccccaatcccacctctgtttattctgtaaactgcaacctataaataacctttagcattcctattgtaacaaaattaatttttatgaaataaattatatttcctagtct

SEQ ID NO: 379 - DNA, 920 bp, Homo sapiens
  misc_feature: Incyte ID No: 110678.1
  unsure 674-675, 678, 684, 686, 729, 815: a, t, c, g, or other
cagaaggctttctgtgcagctagaattttcttccaatgcacaatgaaataagtacaaaactatgcaaacaaagcatttgtccacacaccacttagaaagcactgttggctcccacctgtgtgatggggcccgccctgtgggagactctgatctttgacatctgacttcagatcagatgggagggaagggggatggtgagagtgaacctcacatagggccggggcccatgtgaatatcggggcggggggggggtgctcctccatgccaaggggtgcctgcaggtacagtcatgcctaacagtctggggagagtctcttggggcatgagatatctccccacgagaacactttgtgaccacattgatcacagactttgtcggggagtggcccaccccgcctcagatcacagctaccatgaatcattgccactcgggcccgctgccaaaacatctcgtgttgggctagaccagtcgctcatttatcacttcaagagatacttattgtgtgcctactctgtgccagacactggattagacagtggagaacaagacacataagacagctacaaaacccctgttctagtggaggaaggcagacagttgagtagcagaacaatagagcatgtaagagccaagtcacaatgaatgctattattattaagtaaaatcaagatannccnggaggnangacaaatctcctctacagaagaatgccaataatttatggaganacgcgaagacgtttcagaacctaatgtcccattctctaagtgtggcctgtgtttactgactttcttccacagagtatggtatgganaggaggaggaaaagtgacttcacagtggcgaaagctgatgaacattagcttggccaagtattggagattaacatcaacagttataagtcatattgatagtatgtg

SEQ ID NO: 380 - DNA, 466 bp, Homo sapiens
  misc_feature: Incyte ID No: 239093.1
gctcgagttaccatgttgttaagtcatagatgaaaacaagcaatgtttgaaggatagtcccaacctccaggtgtacctaatcctgatgaagccgatgctgttagcaccctcccatatccctgggccttttagaattttcagttgatttccaactgtcagtatttgtacctctgtacctgcagccccttttccttggaaatatgtgttgcttatttgcaaggcaaaccggagtagcaaagaattaacaccccccaaagccctacaggcagatccctcaaccaacggctctcaggagttgatgtataaatgccccagctccttgtaccttgggcagaataattctgtggtgtgggttttgcaccattcctagaagttttcttgcaaggttgagctcaggtgcccactgtggtagctggctcggtgacacgttttattggctgtcctactgtccctgtatcatccagcc

SEQ ID NO: 381 - DNA, 1723 bp, Homo sapiens
  misc_feature: Incyte ID No: 237963.11c
gcaaacatctttattaatctcatataaaaataaggtccatggacggtcctcggggctggggcttgcgggggcgaggtgcactttataagttacaggccaggctcctgctgaggctaagtatggctatttggagggggctttagggtgggtgctgcaagcagcatttgggggaaggggcgggcgatgctgccctctgtggccaagaggaggatgcaccagcccgtttgaggcgggccacagcggaggaaggggctgcccggccagccgagctgaggaccaccttccttgagcctcagcctgtccacggccccacacccctgcagaatccacctgcagaaatagcggctacagcgagaggtcggaggtgacctgcagtggggggcccgggggacgccgacgggcactgcggcggcctgtgtctgcgcggatgtagggctggttccgcagatctggcagccgaaggagacacatttaccattcaggagtccgcccagagctgggagcatggctccagggcacaaagcttagcctcctaaggactcagattgtgtgcacatggcaggggtaccgtttatgtttgccagacccctccaccccacaaatcacatcccagccatccactggcccaggagaaggcagcatgcctcagttctcccaagggtcccaggggctgtgggcagcgtggtatcagaggccaggtcatctgggtacctgaggggctagaggggcatctcttctcccaggctggcctcacagaggagccgggatgtccgcttgccggtgcgggccgtgaagggcaccgtcttgatcactgagtgggggtggggcaggtgaaggggagtagagaaaggaaaaaggaaagaaaaacagaaaaggtagcaagaagcagtgtggcagccagtcccccagaggatagcgcattgggtcagaagaaagcatagaaggacagactgaggataagaccaaggcctggccaagcccttacctgtgatgatgtcttcaatggccccatcacggtcgctctcataaatgagtggctccttctgctgcctccgtttcagctcagagatgaggtccatctgtggccgccgggcctttggcggtgaacttgggtgctgggggctcccctttgcccggggtatcagcgcctgcctcctgggcagcggcttcttttttccactgttccacctcctgctcagctttctgtgggccaaggcagtctccatgagggtggccctccctactgccctacccaccccctaaacagaagcagccccacccctccgctgcccagtagaaaggcttcagtgccctacagggctcccagcctgccccagacccgaataccttgtaggccttaatgaagcggcttaaagagggagaagaacaggcctggggatctgtgcttggggttctctccgaagtactccaccacagactcaaaggcctcctgagccgtcttgctgtctaccagcagcttgtccatggtgggcgagttggccctcaggaactccttgagcaccatgcagtcatcctgccgcacgaactctctctgtgtcaactctaggcctcgctgcagggagcgcacgtccgccaggacactgtccagggacactgagcccgccttgtccaggaagtgcaggtcgctgtggaagcctgtgagttgcgggtacttctcagcaatgaccttcaccaggtagtcagcagcgtctgcttgcgatca

SEQ ID NO: 382 - DNA, 2352 bp, Homo sapiens
  misc_feature: Incyte ID No: 237963.8
acgccgcctcccggaggtcctcctgatgccctaggaagacgcgactgcagaattgggcccaggagtgaaggccaagaagcccatccagactaagttccgaatgccactcttgaactgggtggcactgaaacccagccagatcaccggcactgtcttcacagagctcaatgatgagaaggtgctgcaggagctagacatgagtgattttgaggaacagttcaagaccaagtcccaaggccccagcctggacctcagcgctctcaagagtaaggcagcccagaaggcccccagcaaggcgacactcattgaggccaaccgggccaagaacttggccatcaccctgcggaagggcaacctgggggccgagcgcatctgccaagccattgaggcgtacgacctgcaggctctgggcctggacttcctggagctgctgatgcgcttcctgcccacagagtatgagcgcagcctcatcacccgctttgagcgggagcagcggccaatggaggagctgtcagaggaggaccgcttcatgctatgcttcagccgcatcccgcgcctgccggagcgcatgaccacactcaccttcctgggcaacttcccggacacagcccagctgctcatgccgcaactgaatgccatcattgcagcctcaatgtccatcaagtcctctgacaaactccgccagatcctggagattgtcctggcctttggcaactacatgaacagtagcaagcgtggggcagcctatggcttccggctccagagcctggatgcgctgttggagatgaagtcgactgatcgcaagcagacgctgctgcactacctggtgaaggtcattgctgagaagtacccgcaactcacaggcttccacagcgacctgcacttcctggacaaggcgggctcagtgtccctggacagtgtcctggcggacgtgcgctccctgcagcgaggcctagagttgacacagagagagtttgtgcggcaggatgactgcatggtgctcaaggagttcctgagggccaactcgcccaccatggacaagctgctggcagacagcaagacggctcaggaggcctttgagtctgtggtggagtacttcggagagaaccccaagaccacatccccaggcctgttcttctccctctttagccgcttcattaaggcctacaagaaagctgagcaggaggtggaacagtggaaaaaagaagccgctgcccaggaggcaggcgctgataccccgggcaaaggggagcccccagcacccaagtcaccgccaaaggcccggcggccacagatggacctcatctctgagctgaaacggaggcagcagaaggagccactcatttatgagagcgaccgtgatggggccattgaagacatcatcacagatctgcggaaccagccctacatccgcgcagacacaggccgccgcagtgcccgtcggcgtcccccgggccccccactgcaggtcacctccgacctctcgctgtagccgctatttctgcaggtggattctgcaggggtgtggggccgtggacaggctgaggctcaaggaaggtggtcctcagctcggctggccgggcagcccctcctccgctgtggcccgcctcaaacgggctggtgcatcctcctcttggccacagagggcagcatcgcccgccccttcccccaaatgctgcttgcagcacccaccctaaagccccctccaaatagccatacttagcctcagcaggagcctggcctgtaacttataaagtgcacctcgcccccgcaagccccagccccgaggaccgtccatggaccttatttttatatgagattaataaagatgtttgcaaaagatccgcgtcggctccatgcctgccgcagccacccgcagcctgtttccgctcagcaaacgctttacttgcacaagctcttcatagcaggcctctgcaaaccagcgggcgccggggagaagggctgcttcttcactagagttggcggcgagggagcccgcttcgagggggcggaggctttcgtggctggcccagtatccctgcgggaggccggagggggcgagcgggcagctggggttagacacgccgggccagccccgcagcagttctccttccggctgccccgccccatttgcgccagtcctgcctcccacccgggcatctggccccttttcctttcgccctacccagtacttagttgacgccataagtgacctcgccttacatctccgcgcgtgccgcctccgtcaccgcctgccgggtccccatttcttccggggctgcccccgctcctcgcctgcccctcccctccaccagccagtgtcgccccatctgtctgtcctccgggcacttg

SEQ ID NO: 383 - DNA, 865 bp, Homo sapiens
  misc_feature: Incyte ID No: 400135.1
  unsure 614, 746, 830, 849: a, t, c, g, or other
gctttattgaccagaatctcttacatgtctgtttatgaatcagtcactggcaaggaggaggaaattgtttttcaaactttttaaaccatgacctgcagtcaaaaacacctgttacctgcaacatcatggtccagttcccacacacgcatgcgtacactcatgcatatacatgtaattgaaagcaaagtttcacaacatgaatggggtcagcttccagggcacatagcttcatgggaaggggtggcagggccactgtcatgtgcagctgcagggcaccttccacatgggctgtgactgctggagttgtacactggggtcctgacagaaccagggtgggggagggcagagtcccaggagacagccagcagggccccccccagtgttggctctggttgtagtccctccctagcagacacttgctgtggtttctgggccagatgctgtcatctgctgggtgatgctgagagctcacccttgctgagtgctcgctgggagccgggcactacttggagctctccacagatgcaaactcactcacttggtcctcaccatggttcacgcacacaacagaagtgcccccattttacctataaggaactgaggcacaggggaantagaggaatgttgctcaaggagtccccatggctagtggcatttccgtgctcccgccaccaggctctactgtcaacatcatccctatctgcaacccaagaggaatcagaaaaatagagccgttagcagtccantgtgcctggcctcatttctacttcaaaagtatctggctatgttttgaggcaacagccagacccgtgaagctattcaattcatcngtacaggaatggctgaaanggggtgtgtgtgggac

SEQ ID NO: 384 - DNA, 2454 bp, Homo sapiens
  misc_feature: Incyte ID No: 344398.2
gctcgagttgttttatgggtaaattctagcagcctacacctctaactgctggagaggagaggggaatggtggtggtggggaatgcagactgttacagtttgtcccatatgtgaacctgtagcttgatcgtttttcagccccgtttctgactcctgcagttccagcttgattctaagtagttactgtcctagtgaatagcttccacctcctttttggccctcttatggttttattggcttatgtttttccatcaacgtgttcccatctactgtctgtcatctacaacagacgttttgagatgtcaaatgttttgagctgctggctgcttgtttttgtaaataaagttttattggcacacccaacaaacaagctgaaaaaagatttaaaaattttctacattcaaaagaaaacccaaaagaatttttttggaacgttgaggaggacttcaaaccagctccggagtgctggataccagcaaaggagacagaacaaataaatgggaacccagtgcctgatgaaaatggacacattcctggttgggtaccagtagagaaaaacaacaaacagtattgctggcattcctctgtagttaattatgaatttgaaattgccctggtactaaaacatcatcctgatgattctggacttttggaaattagtgcagtgccactttcagatctcttagaacaaacactggaactcataggaacaaatatcaatggaaacccatatgggttagggagcaagaaacatccattacatcttcttataccacatggagcatttcaaataagaaatctaccttcattgaagcacaatgatctcctgtcctggtttgaagattgcaaagagggtaaaattgaaggaatagtgtggcattgcagtgatggctgtttaataaaggtccatcgccatcatcttggcttatgctggccaattccagatacttacatgaattcaagaccagttattatcaacatgaacctgaacaaatgtgactctgcctttgatattaagtgtttgtttaatcattttttaaaaatagataatcagaaatttgttagactcaaagatataatatttgatgtataaaatgcaaataaaattagtttatcattatattctaatcttgaatattctaccatatttaaaaatatctcaaggtttctgttcattatgaaacatcaatatgttttctaccatttgtgaagaaatgaattttccagtttcaagtacctattcaaaattttattaaaaaccagcaaattaattttaatctctagccataaaaacataagtaatagtaagctcctaagcttggacaaaggctggattctcttcactataactgagtggtaatttaaagacaacaatttaatgtcactaattttcaaaattaaatagtttaagctcaatttaattttgctagatatttaacaaaacatacggctcaacctcataacctatatgtgtgtatgtctacatctgtgtatatatcataggatttgagaatcttaacacatgtataaataagtatatataaactccaattttaaatcttaaaattgctgaatttaccctcatattctttaaaaaacttaaagcattatgaatgtagagaaattcaccagagctcactgcctatttgatggctgtaacaagtcttcaagtatatacttttataataagttgaaaatttcatataattttatttattaagaattccaatctaagtataaaggtacaaggtagtgagaaggaaatactacagttcggagaactgcttatttccaagtatatttaacttataaagttaataaatagttaaatgaaacaaagtttataggtgacctttagtaaatggggaaattaacaggactttcttcttcatcttcaaactcttcagaagcagcaacagggctagttaattcaactcccaattgttctgaaagtttttttaccttctcttctaagagaatattcttcttcacttcttccttgtaattatacttaagatcttcaatttcttcaaaaaatgaaggatcaaaattttccagttcttttttcagcttctttatttcctccttcaaatgctgcttttctagatctgacattttgagctgtgtctctagatcttttattttttcctttagttgatcagcatcaggtatggtgctttcagctccactttggtccttgttagcttctatctgatggattaattctgctttctctttatccagctgatgattagctaatctagaacacaatgataatgtgttaaaaaaataaagcagatattgcttcataaaatatatgggcatttcttatgaactagtgatgtacagtaatcagaacaagctagcctttatcgaagtaaacatttactctcaatgctacaatgtcaccattctcaaacaaaaagcctggaatacaaaagccttcacgtttttc

SEQ ID NO: 385 - DNA, 884 bp, Homo sapiens
  misc_feature: Incyte ID No: 1086647.1
gtcatcttgccacccaccccctaccattgagccaccatgcccagccccaaagccatttcttgaagaatttctcgcaaactcacaaccctcatgaaaaattaatcctcagttccacgagactgcccacccacagacaaaaaaatatatatattcctaaagtcggaccagaaatctgacagctgcctttgaaacccaaagcctcgggttctttcaagctacatgtactaaattgtcgaaggtctcccaggagctctgtactgaggcagacacagaaagacacaaaacggtcgtctttcctgcccaagtaaagcttacagactaactggggagatgtagtgtgcatacaaaacagtaaaagagccatctcaaggacagagagcatagaccaagtcatctggaatggtctacatgccatgcggaagtccaccgaagggttagaacagggtgtcccagactctctcttctgagggaaggttggttgcaaaagtgggattcatgaccctcccaggctacaccatcttctttagaatgagaactgccaggtgacgccctcgctgctcctacctggctactaaacatcgacttcggttcacttcacggatgttcagtggatatcggtcacatgccaggtccccagctacgcattcaaggatggataatatacatagcagcacatccttgaggaactcataccttggtaaagggaaagaaatccatgaatggatacctctgtgtcctaagtgtttgtaataatgctgtgtgtcaggctctcgtgagcccatagctaatgcctatcatatcgccctcgtgacgctgctatgtgcacatccagacggcatggttccataccattaacgtgagtgatattccaccgacataagaag

SEQ ID NO: 386 - DNA, 700 bp, Homo sapiens
  misc_feature: Incyte ID No: 001682.1
  unsure 693: a, t, c, g, or other
ggcttttgctgcctggtaatattcaggctaaaggaaagccaggtgtacaagatatgaaattcaattagtgtctgatttgttaaagtaatagcaaatcatatacatttaatgagtgttgactcttgagaaatacaatctgaaacagttttacaatgctcaaaatagatgtgaaagtttttcagctgtgacaattttttatcttatgtgggtaaaatacatttttataagaaaagattaatatatagcttattaagtttgattgaggcagaaagaaggattgaaagagaaaagaagagggagagggaaggaaaggcaggggagaggaggggagcagggccgtggaaggaggagtgaggaagagaaaaagagagaaagcagagggttacataataaggaaggtactttttctctgtgagcccagaagagattgccaaccatgttttcagtaatgggatcagtgttagcattagggcaccacttacaaagatgagtactaattttgagggcaaggtgctgatttatctgcctaggttctggcacacatgtttaaagattcacctaattactttagagcaacgcccctcccaagtattatagagaagaaagaggagaatgatgtgctcaagaaaacaatgtggagaagtttatattggttgtttaaacatagtacctaaaaaaaaaaaaaaagggcgnccgccga

SEQ ID NO: 387 - DNA, 530 bp, Homo sapiens
  misc_feature: Incyte ID No: 010190.1c
gggattataggcatgagccactacacccagcctagtttcctttttcaaaaatgattgtgctataagaatcacataaaattataagaagaatcatgttttaaagtttcttcagcatttttaagcaccctcaataactcagaaatacttataaaaaccaatatgctaatcataaatacttcagataattacatctcgttagtacaatcaactgcttaaaataaactaagaactatttatttaagactactttatgtcactctaagacttgaaagcaatacatctgtgtttatttttactactcaaccactctgatgttttattaattcagactgttcttccccagaggaaaggtggtttcctataaagagcaattgatcactgctggatacttgtatggtgttaaagctttatgaagagctttctggtcctgcttcctcatctggaaatggcaaaaatgctttctctggttacctctcaaagttattgtaatagtaagtaaacaatatgaagggtctctagatcgaaaaatc

SEQ ID NO: 388 - DNA, 361 bp, Homo sapiens
  misc_feature: Incyte ID No: 205311.1
agagatgttgaagttgtctgacaagaacttcaaagcaactattataaaatactcacatgtgcaatcacaaacacccttgaaataaatattagaacaaatgtatcagcaaagaaacagaagatataaagaagagccaaatcaaaattttggggttgaaaactgcactaaccgaaatcacttattgtatgaacttagtggcagaatagagatggcaatggaagagtcagtgaacctgaagatagatcagtatggattatcaaatttaaacaactgagagaaaaaacatgaaaaaataaaaaagtgaacacagcctcatggacttgtgggtctaaatttgtttccttagaattccagaagaaaa

SEQ ID NO: 389 - DNA, 1455 bp, Homo sapiens
  misc_feature: Incyte ID No: 022429.7
  unsure 244-380: a, t, c, g, or other
gtgggatcgtttgtcgcgatgtggagtggccgtaagctgggctcctccgggggttggtttttaagagtgctggggcctggaggctgtaatacaaaagctgcgcgtcccttaatttcctcggcggtttatgtgaagaaccagctcagtgggactctacagattaaaccaggggttttcaatgaatacagaaccatatggttcaaatcctacaggacgatcttttcctgtttgaacagaataaagnnnnnnnnnnnnnnnnnnnnnnnnnnnnnnnnnnnnnnnnnnnnnnnnnnnnnnnnnnnnnnnnnnnnnnnnnnnnnnnnnnnnnnnnnnnnnnnnnnnnnnnnnnnnnnnnnnnnnnnnnnnnnnnnnnnnnnnnnttgggcgagactgtacagtacttcccaaaccactgtcgacagcggtgaggtaaaaaccttcttggccctggctcacaaatggtgggatgaacaaggagtatatgcacctcttcattccatgaatgacctgagggtgccatttattagggacaatcttctgaaaacaattcctaatcaccagccaggaaaacctttgttggggatgaagattcttgacgttggctgtggtggtgggctgttaactgaacctctagggcggcttggggcttcagttattggaatcgaccctgtggatgagaacattaaaacagcacaatgccataaatcatttgatccagtcctggataagagaatagagtacagagtgtgttccctggaagagattgtggaagagactgcagaaacatttgatgctgttgtagcttctgaagttgtagaacatgtgattgatctagaaacatttttacagtgctgctgtcaagtgttaaaacccggtggttctttattcattactacaatcaacaaaacacaactttcctatgccttgggaattgttttttcagagcaaattgcaggtattgtaccaaaaggtactcatacatgggagaagtttgtttcacctgaaacactagagagcattctggaatcaaatggtctgtcagttcaaacagtggtaggaatgctctataaccccttctcaggttactggcattggagtgaaaataccagccttaactatgcagctcatgctgtgaaatccagggtccaggaacacccagcctctgctgagtttgttttaaagggagaaacagaagagctccaagctaatgcctgcaccaatccagctgtgcatgaaaagctgaagaaatgaattgtttctgagaactatagtaatatggcttggatatctgatgttttcaaatacaagaaatgtacaatttatcctttgagagagaatcatgaagaaaagaaggtcaataaaaagggctaaaaccttggacaaaagtttttgttatttcgtctaatagctactttcaagggattctgtgaataaaaagttttgtcaagaaaaaaa

SEQ ID NO: 390 - DNA, 198 bp, Homo sapiens
  misc_feature: Incyte ID No: 059379.1
gctcgaggtagaagggagagtgaggtggaagggatgtgggagggagtgagacttggatattggggtatactttcttggcatagtttcaacttttgaaagcatgttaatgtccaacatattcaaacagttaaataaaaatgatatcactgggacagggacctaaaattgtaaacaaacaagtgaacttaattcattttt

SEQ ID NO: 391 - DNA, 578 bp, Homo sapiens
  misc_feature: Incyte ID No: 236253.10
gagaaaatggaggcctttggggaaggggcagggtgggaggatttcttctccacacagaccttaaccttccaatctattctgcagatgaagaatgccgactacttctccaactatgtcacagaggactttaccacctacattaacaggaagcggaaaaacaattgccatggcaaccacattgagatgcaggccatggcagagatgtacaaccgtcctgtggaggtgtaccagtacagcacaggtacttctgcagtgggtaggtgagggaaagatggtgcctcattcgagcctgcccaacctggcctgctgtggatgctccctccttctctttctctgcagaacccatcaacacattccatgggatacatcaaaacgaggacgaacccattcgtgttagctaccatcggaatatccactataattcagtggtgaatcctaacaaggccaccattggtgtggggctgggcctgccatcattcaaaccaggggtgagtgggtccctgtgcccagaatggctgctggatatagaggtcagaaacctctgttggagtctgttttgcccctaactcacaaaaata

SEQ ID NO: 392 - DNA, 2891 bp, Homo sapiens
  misc_feature: Incyte ID No: 331033.1
tgaatttcgtggaggctcgggttgtgagggttcctgcttcggagtcggcggtggtcgtccagaccgagtgttctttactttttgtttggttgaggtttcacgctagaaggtggctcaggatgtcttcatcacattttgccagtcgacacaggaaggatataagtactgaaatgattagaactaaaattgctcataggaaatcactgtctcagaaagaaaatagacataaggaatacgaacgaaatagacactttggtttgaaagatgtaaacattccaaccttggaaggtagaattcttgttgaattagatgagacatctcaagggcttgttccagaaaagaccaatgttaagccaagggcaatgaaaactattctaggtgatcaacgaaaacagatgctccaaaaatacaaagaagaaaagcaacttcaaaaattgaaagagcagagagagaaagctaaacgaggaatatttaaagtgggtcgttatagacctgatatgccttgttttcttttatcaaaccagaatgctgtgaaagctgagccaaaaaaggctattccatcttctgtacggattacaaggtcaaaggccaaagaccaaatggagcagactaagattgataacgagagtgatgttcgagcaatccgacctggtccaagacaaacttctgaaaagaaagtgtcagacaaagagaaaaaagttgtgcagcctgtaatgcccacgtcgttgagaatgactcgatcagctactcaagcagcaaagcaggttcccagaacagtctcatctaccacagcaagaaagccagtcacaagagctgctaatgaaaacgaaccagaaggaaaggtgccaagtaaaggaagacctgccaaaaatgtagaaacaaaacccgacaagggtatttcttgtaaagtcgatagtgaagaaaatactttgaattcacaaactaatgcaacaagtggaatgaatccagatggagtcttatcaaaaatggaaaacttacctgagataaatactgcaaaaataaaagggaagaattccttcgcacctaaggattttatgtttcagccactggatggtctgaagacctatcaagtaacacctatgactcccagaagtgccaatgcttttttgacacccagttacacctggactcctttaaaaacagaagttgatgagtctcaagcaacaaaagaaattttggcacaaaaatgtaaaacttactctaccaagacaatacagcaagattcaaataaattgccatgtcctttgggtcctctaactgtttggcatgaagaacatgttttaaataaaaatgaagctactactaaaaatttaaatggccttccaataaaagaagtcccatcacttgaaagaaatgaaggtcgaattgctcagccccaccatggtgtgccatatttcagaaatatcctccagtcagaaactgagaaattaacttcacattgcttcgagtgggacaggaaacttgaattggacattccagatgatgctaaagatcttattcgcacagcagttggtcaaacaagactccttatgaaggaaaggtttaaacagtttgaaggactggttgatgattgtgaatataaacgaggtataaaggagactacctgtacagatctggatggattttgggatatggttagttttcagatagaagatgtaatccacaaattcaacaatctgatcaaacttgaggaatctgggtggcaagtcaataataatatgaatcataatatgaacaaaaatgtctttaggaaaaaagttgtctcaggtatagcaagtaaaccaaaacaggatgatgctggaagaattgcagcgagaaatcgcctagctgccataaaaaatgcaatgagagagagaattaggcaggaagaatgtgctgaaacagcagtttctgtgataccaaaggaagttgataaaatagtgttcgatgctggatttttcagagttgaaagtcctgttaaattattctcaggactttctgtctcttctgaaggcccttctcaaagacttggaacacctaagtctgtcaacaaagctgtatctcagagtagaaatgagatgggcattccacaacaaactacatcaccagaaaatgccggtcctcagaatacgaaaagtgaacatgtgaagaagactttgtttttgagtattcctgaaagcaggagcagcatagaagatgctcagtgtcctggattaccagatttaattgaagaaaatcatgttgtaaataagacagacttgaaggtggattgtttatccagtgagagaatgagtttgcctcttcttgctggtggagtagcagatgatattaatactaacaaaaaagaaggaatttcagatgttgtggaaggaatggaactgaattcttcaattacatcacaggatgttttgatgagtagccctgaaaaaaatacagcttcacaaaatagcatcttagaagaaggggaaactaaaatttctcagtcagaactatttgataataaaagtctcactactgaatgccaccttcttgattcaccaggtctaaactgcagtaatccatttactcagctggagaggagacatcaagaacatgccagacacatttcttttggtggtaacctgattactttttcacctctacaaccaggagaattttgaatttaaaaataaatccaaacattttccttcatattatcaatgcttatatattccttagactattgaaattttggagaaaatgtatttgtgttcacttctatagcatataatgttttaatattctgtgttcatcaaagtgtattttagatatactctttctcaagggaagtggggatattttgtacattttcaacacagaataaaaaatgtactgtgaaaaaaaaaaaaaaa

SEQ ID NO: 393 - DNA, 878 bp, Homo sapiens
  misc_feature: Incyte ID No: 345533.8c
ggatccactttgggagaaagaaaagctatgaaaagatttagatggtagatccccaaggcataggtcacaatgtaccaaccctgcagcaggtaaactcgaatcatgtagacaaagctcaggcccagtgtcacgacccatcgcacagccgtgtagggtgtggacttgtctagccaggactgataaatctagaaagacaagagtccaaaagcatgaagcaggtcctgtaacttctgtactgaccctgccacaaaatgtaccttctgctagggttggctttcaatttttaaaacagctaaaagagtgagttaaaatagcaagagatcatctatgtatcagcacaaagaagtgactacaattaatccaaagtttattttcaataattcctgaagcaggttcatctcttaagcaagactattacaaaacaatctcctaggagactgtgacattgtgctggccccaagggatcactatggggaagacccagcctcaccccaaagagaggactgtgcatctcaaagtccccaccctacagcacagcccttatcgtcacatctcaagtcagctcccccatctgcagcagccagcagccagccttgccccgctcccaggcccactggccacagcctgagccccagcagccacacccacatgtgtgtgcgtccaggcggctgtggacatgaccgaaggagcccttagttttatgtatttatttttacaaatatacatatgtatggttttttattttaatttagaaatttaattttcaaattgtgagaaatttccaaattcacaaaagtaaaaagattatagaagcttacatatgcctgtcacccaacttcattaatcgccaatcgcttttcatatgtgatttaattaag

SEQ ID NO: 394 - DNA, 3037 bp, Homo sapiens
  misc_feature: Incyte ID No: 238342.1
ctccgtggaaaaccggccaaagatctcagccttcctgcccgcccggcagctctggaagtggtcggggaatcccacacagcggcgtggcatgaaggggaaggcccggaagctgttctacaaggccatcgtgcggggcgaggagaccctgcgtgtcggggactgtgctgtcttcctgtcagctgggcggcccaacctcccctacatcggccgcatcgagagcatgtgggagtcgtggggcagcaacatggtggtcaaggtcaagtggttctaccaccctgaggagaccaagctgggcaagaggcagtgcgacggcaagaatgcgctgtaccagtcctgccacgaggatgagaacgacgtgcagaccatctcccacaagtgccaggtcgtggcgcgcgagcagtatgagcagatggcccggagccgcaagtgccaggaccggcaggacctctactacctggcgggcacctacgaccccaccaccgggcgcctggtgacggctgatggcgtgcccatcctatgctgagccgcccaccgcagatgcctcccacgtgcgccagggaccctgtgtgcggagcctggcgtcggccaagccaccgggcaggaggcagccccggcctcccaagggcgcatctgagcaaatatgcaaaagcccacagggcaagacccaggctttcttacggttttccctggaaagagcgctccaggtgtcggaatccagtcccgtcccatcctctgcggagggtcgggctgtggccctcatgggtccccggcccgccccacccacagcgccctccgtttcccgcaccggcagttcacgggagatttgaatccaagccatattccctagtacctccgactgtctcccaccagggaaagcagaaatcaggtgtgttgtctatttatttctctatgtaaatattgtatttctgcggggaaattttatggtaaaaagtggaaaagggtttttccccatccgcgtgacaaggtgtgtgtgagcgtgtatgtgtgtgcgcgtgtgtggcgatttttgtcctggggtttcctttggaaatgcactgttctcagcccagctgggttccaacgggggcacctgggacgacagaggcatctcggggcagggggcagaggccacgggagggtcaggtgggacccttgacggcaccctctgatctcttggggggacgaccgtgtaagatgaaagtcggtcaagtttatttgctttcagtgcatctcctagaaaagaagtgttggagcagggggtggtgatgaggggcccgtggggaaaggattcaagaggcaaagcccagaccagggagtgtgacaacagccgtgagcatctcacctgtgttcaaaacaagacaaagacgaacaaatattttaaagtattgataagaaaaagcaatgtttggattgtatctgctgaatcatattccaacctatatctgatttctgtttccggggccagttggtctgaggccaaggagtctggcctccacccagagcagggaggggctggcccctcgcccccctcaccctcgccgccctggcacactcgggaagcagggcccagctctgagcccctcctcacccctggggtcctaactttcctgaaagtagtaggtgccgtgagaaggggcagtttggccaggttcctgaactgggcagggctcggggcctatgagggcaggttcacagtcccaccagattctctcctcacccccaagcagaatgcatgcaaaagacaccccttttcccacccaccttattggtgcccccaaacccctggcctgctgcgtagatggtggtgaggccaggccagcagtgctgtggccaggggagaagaaaataaaacgcaggccctgcccttggggaaggccccttcctgggcccccttttccaccagccaaatctgcctggccctcggacccctctgcctgccccaacccctttggaggtttctcggccttttctgtgccacttggtggggcagatggcctgatgggctagtgcttggggcatagaatgagggtccccctgaccacctgagcccaaatcctggccccaggtgcaagcagcacccctcgagggctctgccccagtatccccagagaattcacacccctccccttctcccacagccaaggacagacaggctgcctggacctgagcccaacagccttcagcctcagaaacgcatggggggccacacactccttatatcctcccacactaaggttcccctggccccacgggagcttcaggaaagccccccaagttagccactgctctaggacgagctctgtgtcccccacaccacaggcctcgaagcagggtgctggtgggtgccctgcaccccaatcccaggtccccttggccccctatttttctcgggcccattggggcctgtttctcacctgctggctggaccccctgaagggccgttcccagaggctccccaggaggctcaaggctgggggcttatgttgtggtcgggggtccccgcctccagccccccgctcccacccccgagcctaccctttgtctcgcatgagtgcaatatttcattcccggtggttgtctggggaggtggttggacgaggtcctgcttgaggctcggggatcagaacgatgtcaagtgaagaaaaatgcacgggggcatgctgagccactggagttccagagagggccgaggagggtgcagccacggaggttggatcctctgctccgccgcctcgtcctcgtcccgcttctgctgggttccgctttgtccctggttttttcctttttttttctgtgtgcgtgcgaatggtgcggcccctcccctctcaccgtggttaacgtgacgaaggcacgattcctgtaaatgtgtaaactaaggggatggttggattttttttcaatgtaaacactaaaaacaaaatggacaaaaaaacacacaaaggttttatgaacagcagactctatgtaaaggcattttagtatcaaattttttattgataacttgcttaagaataaatatatggactattgtacaggt

SEQ ID NO: 395 - DNA, 604 bp, Homo sapiens
  misc_feature: Incyte ID No: 028936.1
gattttttgtaaatactgtgtctaatgggtatatttaatgtcagagttattgtctctcacttcaatatctagtactggataatgtttctcctgggagcacgtatttttttttcaagtcctcttttcctggacttaacatgttcttctagaagacaccagaagtcatgaccctaagccccctcccttcaggaccactttctaccatcggttttcaaaaaactatccacatgttaattctgttttatgttctgtgattctgtggtagactcagtgctttcagagtccagagcttgacttgggttagtggccttaatgaagtgctaaatttgctctttaccgcgagactgatcagaagaagcaaaaggggaaagggggctagaggtccactcgcaccttttacatcagacaagaggaggactgtgccagaaatctgtgcatgaaacaccatctgctcttcatgcagggaggggtcaaccgtgtgaacgtgcagagattactcgagccttctttgccaaaaatatgcattcttcccagctgtaagcgtgtgaagccaaatatgtcttttagcatgaaacaataaaaacatgtttattttcacttaaaa

SEQ ID NO: 396 - DNA, 309 bp, Homo sapiens
  misc_feature: Incyte ID No: 347865.5
ccgaaaccaagctttctcatcccaagcgccaacctttatcaagtctagcctagtcctctattgtctcctaagtgtccctcatgagtgatcacttctgagtcctcctgcgtggagatctcacccactgggggcgtatctttcccattggaaaagtgtggttattggaagtttcctctttttagaaagaacaggattggaggtgctctctggggtgtcctcctaccaagctgactgttgaagtccttgtggtgctcaaggaggatgggtgacactcgctgttgcttcagcttcatcttgagcccacacagc

SEQ ID NO: 397 - DNA, 721 bp, Homo sapiens
  misc_feature: Incyte ID No: 347865.4
  unsure 699: a, t, c, g, or other
ccgaaaccaagctttctcatcccaagcgccaacctttatcaagtctagcctagtcctctatcgtctcctaagtgtccctcatgagtgatcacttctgagtcctcctgcgtggagagctcagccactgggggcgtatctttcccattggaaaagtgtggttattggaagtttcctctttttagaaagaacaggattggaggtgctctctggggtatcctcctaccaagctgactgttgaagtccttgtggtgctcagggaggatgggtgacactcgctgttgcttcagcttcatcttgagcccacacagcatctccactacccaggtctcctcaggctcaggggcgagctccttctccggctcctcctcagattcatctgaccactccctcttccttttccagccaagggacctacatggggggctgggatctaccccaggggctgagtaaagaaaccaggccaccgtgtaatgcttctgcatctgatcaccttagaccccgacccaaaaccccaaaccactctccatcctccccagacttgcagactgctggcttctctaagccatctttctgattttctcctctgctcaaccccatgtgccgctccttcccctccccattcttctctctctctgtcctccgaacactgcttcatgtccttccctggtctctggctctctgagtccctccttttttgtnttgttttgttttgacagagcaa

SEQ ID NO: 398 - DNA, 2772 bp, Homo sapiens
  misc_feature: Incyte ID No: 040057.2
ctttttaatggttgcattgtgttctactgtatggatgcaccattcccaatcagttccctattaacggatatttgggttatccctaacttttgctatgacaaatagcactgcaataaccttgtatacctattgtttccatgtgtggagctgcaccttcagaataaggttagggttagaagtataactgcaaggtataagaataaacacaagtaattttgtactccgtggaacttgaaccatttttccactcccaccaggaaaggtaatttcaacgtgtatttccattgtaagtgaggtggagcgactttctatgtttaaagaccattacggtattttttctgagaatcatctgttcatgtccttccccattttctcctttggcttttgcactttttgttttcaatttttgagagctcttgtgatacgagttgcaaagattttctccagaccgatctgattcactggaaatatactacgaccatctggaatgtactttaatcttatcctaataaatcaccttactacaagacactcctttggggatgaacaggtttgataaagccggctaaggacagaccaatcaaaagaattacgtgctcttctagtaagtgtttagagactgtttcacgttctccaggtaacaccgccattactcggcggtccagatggcagtcttacttcagggagtctactccacttgcaggacctctttgattgagttcactaaacctcacagggccgccttccccgtgttccagttagcaaggggccctcaacgccgcggacacagcgcaacctccgacgccagagaacaatagctcctcgatgcgtctccagagatgtcaaggaggaacgaacccagcggccaggagactgcgcctcacgactgatgagagggaaggcatcggtttctaagttctcaaaacttacaggtgagcttctgctaagagtaaacgcccgcggctcgccgcccacggcctctctcttgaggtggcacctggtcctccgacacgcggaagcatcacggatgagcgtcacgaacacagagcggccaatcacgcgccgccttcgcccagatccctccgcacgaggcagccccgcagccgcaggtggccccggcgagtacttccaccttcccttcccgtgatgccctggggctgacctccgacctcgctggcccgcccctcccctcggccgcttcccttactgagcttgctgagctccggggcccgcggagctcgcgccaggctcctgggaaaggacggggagtgttaccggggagcagctgctccattgtgcctcgaggccccgatcgggctaggccgacggcctccctcccttcacctttcctctcctggcggggttcggcggcgggcgagtgactgcggccacgcctgaaaggcgactctcctgattcaagatgaccaacgaagaacctcttcccaagaaggttcgattgagtgaaacagacttcaaagttatggcaagagatgagttaattctaagatggaaacaatatgaagcatatgtacaagctttggagggcaagtacacagatcttaactctaatgatgtaactggcctaagagagtctgaagaaaaactaaagcaacaacagcaggagtctgcacgcagggaaaacatccttgtaatgcgactagcaaccaaggaacaagagatgcaagagtgtactactcaaatccagtacctcaagcaagtccagcagccgagcgttgcccaactgagatcaacaatggtagacccagcgatcaacttgtttttcctaaaaatgaaaggtgaactggaacagactaaagacaaactggaacaagcccaaaatgaactgagtgcctggaagtttacgcctgatagccaaacagggaaaaagttaatggcgaagtgtcgaatgcttatccaggagaatcaagagcttggaaggcagctgtcccagggacgtattgcacaacttgaagcagagttggctttacagaagaaatacagtgaggagcttaaaagcagtcaggatgaactgaatgacttcatcatccagcttgatgaagaagtagagggtatgcagagtaccattctagttctgcagcagcagctgaaggagacacgccagcagttggctcagtaccagcagcagcagtctcaggcctctgccccaagtaccagcaggactacagcttctgaacctgtagaacagtcagaggccacaagtaaagactgcagtcgtctgacaaacggaccaagtaatggtagctcctcccgccagaggacgtctgggtctggatttcacagggagggcaacacaaccgaagatgactttccttcttctccagggaatggtaataagtcctccaacagctcagaggagagaactggcagaggaggtagtggttacgtaaatcaactcagtgcggggtatgaaagtgtagactctcccacgggcagtgaaaactctctcacacaccaatcaaatgacacagactccagtcatgaccctcaagaggagaaagcagtgagtgggaaaggtaatcgaactgtgggttcccgccacgttcagaatggcttggactcaagtgtaaatgtacagggttcagttttgtaatattttttcagcaaatttttatacagtgtcatttaatttgggagaggatactgtccagaaaattaatgcatacttttgtcacaatttgcctttttgtgggtgtacgttttggtttttttttgttgttttttttctttgtttttttttccttttcttttttt

SEQ ID NO: 399 - DNA, 803 bp, Homo sapiens
  misc_feature: Incyte ID No: 997301.6
  unsure 54-80, 197-261, 668: a, t, c, g, or other
aaagtttgagactagccatgaaaatatatcaagaccctgtcttgtatagggtannnnnnnnnnnnnnnnnnnnnnnnnnnacaaaaaagtgtaaaaatattttctaatcacatatttggtaggtgttaatttccaaaagatataaacttctgaaattcaacaacaacaaaaagttaataacttgatttagaatggtnnnnnnnnnnnnnnnnnnnnnnnnnnnnnnnnnnnnnnnnnnnnnnnnnnnnnnnnnnnnnnnnngtccgagggcaggactatgggaggctgccctgtacggaaaagaagaagaaatggcagtaaagagggcaaccatcattccacccagcccaaaaggaataagagaaaccctatctttcaggattctcaagacacagttttcatggagtgataatgaaaggagcagcagccgccttaatatcccagagagagaagatggacgagaaggcaacttaaaccagattgttactgaacccaatgcaaactttccctagttcttgcatgaggggtatgtatcatgccaaggtctttactcccatatcaaccagatcttgaaggaggctcacttcaacagcctgcagcagtgagggcaagctccaacatgatgaattaggacttccttattccaacctaaactgtgtttataaaantaattgcatacacaccaaaaaaaaagtctattggtttttaagtctaaattttaagtaacaagttaatgggcagttgtttaattggggttttacttcactgctgtacttttaaagaggctgtgaataaatgtttat

SEQ ID NO: 400 - DNA, 428 bp, Homo sapiens
  misc_feature: Incyte ID No: 012235.1
tgactttgtttttttataatcttgcttacatgttttcatgactcctggcatggggagtagctacagagaaatctaagaatggccctgtctgagagatatgttaccctaaacaccaagactcaatatatatgacttaagaaaaaaaagatccttatgcactatctgaaggtgatgcttcctgacttttgcaacagaaagaatgctgtcttcctgtgcctgcggagatgataatcaagctggcacactgacaatcaatgtaaattcattaaacaaaacaggaagtaaacaggtatctttaagtttgtatctcccattcataagtactttcaatcatacctggttatgaaatagttttgatgttgcaaatcaataaaacaaaaaacaaataaatgaaacccaaaggaaaaaaaaagaatggaaaaatcccg

SEQ ID NO: 401 - DNA, 2369 bp, Homo sapiens
  misc_feature: Incyte ID No: 245496.7
  unsure 137, 140, 148: a, t, c, g, or other
gcccggccaaggcgagtgccgcgcgggccaccatggccacggacgagctggccaccaagctgagccggcggctgcagatggagggcgagggcggcggcgagaccccggagcagcccgggctgaacggggcagctgcngcngcggcggnggcacccgacgaggcggccgaggcgctgggcagcgcggactgcgagctgagcgccaagctgctgcggcgcgcagacctcaaccagggcatcggcgagccccagtcgcccagccgccgcgtcttcaacccctacaccgagttcaaggagttctccaggaagcagatcaaggacatggagaagatgttcaagcagtatgatgccgggcgggacggcttcatcgacctgatggagctaaaactcatgatggagaaacttggggcccctcagacccacctgggcctgaaaaacatgatcaaggaggtggatgaggactttgacagcaagctgagcttccgggagttcctcctgatcttccgcaaggcggcggccggggagcttcaggaggacagcgggctgtgcgtgctggcccgcctctctgagatcgacgtctccagtgagggtgtcaagggggccaagagcttctttgaggccaaggtccaggccatcaacgtgtccagccgcttcgaggaggagatcaaggcagagcaggaggaaaggaagaagcaggcggaggagatgaagcagcggaaagcggccttcaaggagctgcagtccacctttaagtagcgggggctgcagccgaccgccctgctccggccccagtgtggtgggcgagggtggcgcatgggaggccgagcctgaatccttgcctgtgtctgacgggaccactactaaaaacctaaaaatatctgtgaatggagcaagttcaggggtcttatggaggtggcccggcccctccccgctcccttccactctgcacgaggccgccacaccggcgctggctccctgcccggcccggccctccctggcaatccctgggctctcttgcacccctaactgccccctgcctgctccggcactgccccaggcccagctcctggccctaggtccctcccagccccatgtgcctgccgcctgccctccacacatccctgtccccccaacccgggaacccctgccctcctccagcaggccgcaccgcccctggggccccctgccagccccttcccaggctgggagacagcagaagagatagaatcagggctgcccccacagagtgggacccaaggggctaattggaggcacgaggggacccctccccagggccttttcctcctctgcgtcttccatctactgaaatgggagagggggtggggagcttctgttctggtgaagggacccgggcaggcccccagcaccccatgctgacttggagaaccccagatctctggggcccagccaggcagggtgtgggggcagctgtgccaatctacctcacaggcccaccccctgccgggcatgccgtgggatcatgggcagggaaggctctgggggtcggagacaccgctgcttagcacccccagccagaacaccctgagggtctcggggctctggagagagtggggcgggaggaagaattggcaccttcctagggaaggagacgagcgcttcgccttgattctccgagaagcctccgagaagtgctttaagtgtgtttgcatgcgccaggcggtgggcagcgggggcctgtccagccctctcccgccatccttccccaagtgacgtccactgccttgtcaccagcgacctgcctgtcatgcccaccccctgaggaagcatggggaccctaacaccctggtgccctgcaccagacaggccgtggtcaggcccaggccaccggccgggttctgccacagcttcccacgtgcttgctgacatgcgtgtgcctgtgtgtggtgtctgttgctgtgtcgtgaaactgtgaccatcactcagtccaaacaagtgagtggccctcgaggccacagttatgcaactttcagtgtgtgtcataacgacgtcactgctttttaaactcgataactctttattttagtaaaatgcccaggagtcctggaagctacgcggacttgcagaggttttattttttggccttagaatctgcagaaattaggaggcaccgagcccagcgcagcagcctcggacccggattgcgtttgccttagcggatatgtttatacagatgaatataaaatgtttttttctttgggctttttgcttcttttttcccccccttctcaccttcccttctccccgaccccaccccccaaaaaagctacttcttcattccgtggtacgattattttttttaactaaaggaagataaaattctatattctt

SEQ ID NO: 402 - DNA, 886 bp, Homo sapiens
  misc_feature: Incyte ID No: 983262.3c
gcagatacaggggcagatctgagggtttgatggagtgcagaaggccacacgtgtggctttctgtaaatgcagaaacatggaatccttgagcagacacttgtcttctggagcaccttgcatggatttcgcctcctgatgcttcattgccgttaatagagtggtggtggttgtgttatgagaaattttgtctaacctggcttctgaaatttctcaaactaaatattcatgctgttttgtgtttttcttaatgactgaggctagtgatattactcagaaaagtaacagtaacttgggtcttctgagcgtcaggatgttcaccatttaacttgtttctcgttagtgtctagtacgtcggctttcggtagtgtaggtgtgtgttctgtgtcctttcccgtgtgtgcctgcactagtggcagcctctgcttccaggtcagtttagagtagactggctctggtattgctagcaagtagttgctgttacccagtgtagccatgaagcccagctccttggatcttgacatatatgttccaggcaaagtacgtaatccagacgtttctaactctttctagatgattgcaattgttctccatgttgtctgttaggcgttatgttaattctcgatctaacagtgtgcctgtaacatatatggtagtgaagagacatcacatgcagagaccgttttccttttatcaactacaggtccgctatcgacgagagcacctttctgctaggcagtcaccctacttcccgttgttggaggatttgatgagagacggcagtgatggtgctgctctcttagctgtgattcactattattgcccagagcagatgaaactggatggtgagtggagaatgcttccctgaaacagatccgaaaaggcttaa

SEQ ID NO: 403 - DNA, 741 bp, Homo sapiens
  misc_feature: Incyte ID No: 998084.1
cggactattgggacgctgcggcctggccttcaggccactggctaccgaaccccgggggctcttcaccagtccagctcgtttccagcaccatgtcggtgcggacgctaccgctgctcttcttgaacttgggcggggagatgctttacatcctcgaccaacggctgcgggcccagaacatcccgggagacaaggcccgcaaagttctgaatgacatcatctccaccatgttcaatagaaagtttatggaggaattattcaagcctcaagagctctactccaagaaggccctgaggactgtctatgagcgcctggctcatgcctccattatgaaactgaaccaggccagcatggataagctctatgacctgatgaccatggctttcaaatatcaagtattgctgtgtccccgacccaaggatgtgctgctggtcactttcaatcacttggataccatcaagggattcatccgagactccccaaccatcctgcagcaagtggacgagactttgcggcagctgacagaaatatatggtggtctctctgcaggggagttccagctgatccggcagacactcctcatcttcttccaagacctgcacatccgaagagagtgcttctggaagcatatgcaagaaactgttcacagtgcacagtgttgccttccaggagtggggaactatatggaggacaggagaaggagactgactttccattatgtatacccttttgagaactttgagt

SEQ ID NO: 404 - DNA, 3616 bp, Homo sapiens
  misc_feature: Incyte ID No: 238071.2
  unsure 2689, 2691, 2702: a, t, c, g, or other
gctgtatatccctttgttaagccagcagctagactcctagattgaattcttttagaaatgggagaatgagcttttttattgactgccagtgttgtctgtattggatgatagcaaaaagtgtagttggacaggttgcccactagatggagtgagaagtaccagactccttttttctctaaagcagatcctttcaggatctgagtcactgggcagtttctctaatgcgagcagacagaccctgttaaccaaggagcaaaggaaagtatatttaaagaggctaaggtgtttggccacatattgctttaggttcatctccattggtctcagtgtggacataactcctggaattcactccagtgcaaagtttaaataataccagcatgagaatgtacttgaaggtttcccaaaatgtgctagacaagaaagagaaaaggtcccagctgagagaaaaatccacctgtctcccatctggggctctttggcctcactgatagaaaaggaaaaggggcccaagctaagcttactttgagggttcatgatgttcagagatgctcaggggacttctccgctgcaggaggtggggtgaggacattggattcatttcctcaaaatgtggagagaaaggagaaaaatcagaattctatttgtacctctgcttcctgtgctgtttatctttgcttgtctttatctttttccacctcaggggtttcatcaggggtatttgggagagtctaggggtggggatgaagaattgactgggagctgaggaggggggatttttatgctgaagacctggcaggaggcaactcctgacacccccacagggttagactgtaaaacctcttccatgacttgctgactctataggataatagcaacaggaaaagaactgagggacgtgcagatgaggatgaatagggccccaacaccagtgcctgaggctgaggttagaactgactacaaagacacaggaaaccaagggcccagtctcccctccacgctgaaatacgcaccctcttgtctgggtcatgtctactatgtgaatacttgaccatggaggtctggggctctggtggcttccatagctggctagtctcttgatggagagaaatcagggcttctctcatccatgctggaatttcatttagatgtcaacttccaagtttccctttttccagatgggattatagtcctgcttctggaacagggtagctgtgtgtggtccaggatagttcaattatctggccctttgttcacttcttacaatcattgatacagtcaacaaaaattggttaaaaacaatatatgccagacatatatccctgagttctgggacaataaccaaaattgaataaggcaatatcctactctcaagcaatagagggtaggaatagaataataataatataatacaatagctctatagcagtatgtaaactataaaagcattattttacgtgtttctattgaactgtcataactaaataagatggttagtactataattatcccaaggattcattcactcatagaacatttgttgagcaattactacctgccagtcacttccaagtggtaagtgagatagaaatggttctttgtggcgctcacaatttattggagaatggaaacacaattacaaaaaaaaagtgtgataagttctgggagaagggtggtacaggatcctgtggggtagtggtggctccatataggagggacattgggatactgatcaggaaggagtgggggacagggctagaagctgcattagtataaagttatgtcagactgccaaaacaaaacaaacacaaaaaatcagtagtctgtggtaaagaattgctataggaacagccagtaggggcagttaagctggtcttggtgaatcaggggaagcgtcctagaggaacagatgtccatgctgaggccaaatgctggacaggagttagccagacagggaaattgcattctgggcagaggagacagcaaaggtcaagaaacatgacaactttggaagactgtaacttgttcagaggcagagggtgcaaaggagaaatgaggaaaggtgaagctggagaggtgggcttggtccagctcttgctgggccttttcagccgtgttaaagatttagactgtatccagagggatgttgaactttaagcctaagactgaaaaggtgagaattgtgccttagatcactatggttgcagtgtggagactggtttggaaaggggagaaatcagaggcttttacagccatcccagggagagagaatgaacaccagaattagggtaatggaagatggaaagaagagaaatcgttttatgggttgctcaggagatagaattgacatgtcttgggattgttttgctgtgtaggggagagagacaagtcaagagtatacatcctgtttctgacttggcaactgggtgggtcatgggtctgtttcctgagacagttgtctacagccataccaccgtaagcgccctaaatctcatcagagacagtttatgcaaatggagcttggggaaagagaggtcgtggctggagacagagatttgggcatcatcaacatataggtgtggggagcagagaaggctgaggaagaaagcaggaaacatataaaaaggagagcagggaaaggagccagtgagacaggaaaaacctagtaacgtggtgtgatgaagctacngngaggaaggaanggaaggaagggcggcgtggaacgctgctgatgggtggtggcggggaaaatgaacgagtatccaccagcaacgagaggggcctccatggtcttggtgggagcatttctttggagaggtggaatcagaagccccagatgtcagagggttaaggaataatttggaggaaaagcgtaaaggcagtggaggtgaggagagaattttcaaaatgtttggcagtgattgcaatgaaagaaaaaaatggagggagcagagtatatgcagttgaggaacttttttagtttggagtgtgttaacacgatgttaggaagaaggatcaagtgaaggagaaaggtgaaaatgctggaaggtggggcttagtgatgaaacaaaccttggggacaggtgggcgtggtactgagagtcccagtgaggggagtgccctcaggcaggcgccggtggcttctgtcacaggagggaacagcgctgacattcagctggttcgcactgatacggctcaaccagtttgttaaaacatgtctgttccagtgtcagtaatatacgagtaactgcaatatgcagtaaaaattataaattctaatacaaactcagttcaagctaattaagagatcgcaacagccgttggtaaatggacttcccgctgcatttgagaagctttgcagcgccatctgccggtgtcgtagcatcactgcaggctgagaggctgctttgcgccttcatcttgaagcactctgaaattgcctgtttaaattaccttggaatcatggagttgctactgcttctgaatagtttagcttctactttgattttattgttagtgcattgtcgttcttgtgtcagtagcaagtttcagtgttttaatatttacaaatacaaaaatttttaataaaatattaaagccaaacttgaatgaagag

SEQ ID NO: 405 - DNA, 670 bp, Homo sapiens
  misc_feature: Incyte ID No: 103930.1
ttgttaagagtgtgaaaatatttgtatgtgtttaccaattctaccatttaaacctctggtattcaaagaggaggctcctggtgacatttctttatatttttatgacagtatgcattttgtttttcataacaacaaacatttattgaaattttcctgtgacacatgtttaagaaaatattccatattttaaccatacaattataataaaagccttgtaagataggcactattattttccccatttatcaatggtaaaatggaggcctagagaggttaatacttgcctaagatcagttgaataatgcatggcagaggcgagctttgaattgaagtcatcttccaagagcctgtgagagctatcctcaatgctaacatgaagatatatctgtgacaaaaaaaccaagtacacgatgcatagttctaccatcaggatgcacacacacacaaaatttaaaaaggaagacctagagtggtataatttgtctagtacagtgtggttatggtttaatgggggctagtatagatatatcactttatcctctgactaaccacatcatgagagatacaggatgtcagtttttaaaccatttaagggctgactttaagaagaaaacttagatggttaaataatgtcaacttttggttccccttaagtcttcaatgatgtgat

SEQ ID NO: 406 - DNA, 437 bp, Homo sapiens
  misc_feature: Incyte ID No: 254068.1
gctttacaaaaaagaagcaaattaattttttttccagatttgtttttgacttgaaactctcctttctaaggcatgctgtatttataatggtcagcttctttgccttcctttaagtaaattagtttgggtctaggtagcatacttatgtttatagtccgctggacacaaggggtcagaaaccatgaaacacaaatgtatcatattaatagaatatgaaatgaaatgactaagacttttaagaatgcattttatctgtggtttattttcctgtcttttaaaatatatatattatttgtaatctaaccatgctattctgattggtttacaattgccagataaaattcaggatgcccagttaaatctgaatttcagagaaaaagaatgaacacctttttgagtataagtgtgtctcatgtaatagattggagagtcatctc

SEQ ID NO: 407 - DNA, 1773 bp, Homo sapiens
  misc_feature: Incyte ID No: 221812.1
  unsure 52: a, t, c, g, or other
gggtttctatggaatattttgctagctgtggtgttcaccgcatccctctagncttagaagagaagattattccttttttctgtagtcattgagtggggtatatgcataagtgggagagaaaaaccaaacaatctacttcagttcagtgtaactatttaattgtgtgggtccatagactttttaatgaagatttctgactttgccactgtaaatgcctttaatgagcattaatttttgaaagttttacagagttttattagttttactactttatcttattgatctctgcagacttgtgctggtgcaagtacatgctgacaggcaatttgcactatatttggctgcagattcaaataggcagttctcttatttggtcgacttttgtgaatgtgtgacataaacagatgtaatgcatgtcacagtgacggagataacactgccatgataaaagtactcatgtttcccctatttggaaaaaaaaattgcttttagtatttttccaagttttcaaaagtgcccattttatgctgctgtgtggtttgttaaatctaaatgatttttaaacttttctcatagaaacttaactttggcaataaacattttttaaggtctctcctcttccttccccaacaatgtagttttctagatgagatttcagtatgattttatcagctatttcttatatatcataatctggcaatttctgaaaccagtcagaaaagacatatatttccatgcctttttaaagaattatttttacctgttttatattcacagttggtgtcctgtcactttgttttaaaataagctagaaccaggatgcttccttattggaaaggctttgccagtccttaaggtacaatgagtgatgctgcaacttgcaaatgtaccagcatttaaaatttcttttcctgggaatcaaggtaactcacacgactacttgcagtacaaattttttgcttctctttcgacatgaaatgtacttggtgggttttccttccttttattaaactaaaactgtgtggaaaaggttgatttttcttaatagattctggattccactcacagggagatgggattcctttcttgtccaaacaaagggagttgctctaaagcgagcatcagttaaaatgtaggggaaaatgtattctgtatgtagtgtagataatactttgtgaatggacaacagttacatagtgtcttggtagcaccagccagtgtttcccagcccagagtttactgacttgtaattctctatccaggacatcaggagtgagggatggaaaaggggataaaaggcctggagccacactctatatggctgaggaaggagctagggaaagagatagacacaatggggtgaaaacaattttgccgcccctgcctggaaactgctggtggggaaatgatggtgaagggtgtttgcttgaactcatgagacggtccaaatctcataaactagccttctcaaaatcccagcaatataaagcactgtttttcttcagtcgtttaaataaacttgtaaatacattgaagtttacatttccatgtgctgttgatcaacggcgccacctgtgtttgctgagactggtctctgagagagttttatgtcgatcgaggcctgttgctcattaagctgagtgcagacgtccttaatccctgcagatagtgggatgaaagcaagttctgtaaaatgaagcacaacatagccaggagtgaagagatggcagatgttaatttcttaaaattttcctttttttattttttttttgg

SEQ ID NO: 408 - DNA, 442 bp, Homo sapiens
  misc_feature: Incyte ID No: 240129.1
  unsure 428: a, t, c, g, or other
gtcttggctttgacttgacgtcatgtatacatttttagtgtgacctggccgttaattacttaagtgagagaacagaccgtattaatagctttcctaagtaggttgaaatcttccgttttctaaatgatatcagtaggagacgatgggtgtatttcttttctgggccaggtagctggcagctgctagagctcgctgagggtctgttgggaagggtttggtgagatgcgttcacaagtctccccagccaggtagtgggctcgatggtaggagcacaggacaggaccagggatcatcctgcatccctcactctgctcgcaacgcagagtcagagacacacgtccaagagcctcatcatgtaacaggaactcaggttttaaaagctaagtgcatctccctaatctagtaagaagtagcacatcagtcaaaanaatgaccaaattta

SEQ ID NO: 409 - DNA, 636 bp, Homo sapiens
  misc_feature: Incyte ID No: 230297.1c
  unsure 545: a, t, c, g, or other
ctttgattgtctctcttacacataaaacaacaacacacacgcacacatacattcctgaaaaccttaacgattattttaatggttcagattttctctgaggctttacaaccacagagaaatatggaggtgcaaagtggtcctaagaagacacattcctgttctttccagttataatttatttaattttattttactttgctgctagttggtagcacaaaggggtgagtcttaccaaaatagaaataactactatttttttactttctttcacaaatattgtggtaccttctcatgatctgagatacattgacagtatattacgcaagttagctatctactctcttttttatgtcattcttgatagcatcttttggaaatcttattgattaattctaattcatcccaaataatttcataatagtcgtttaaactgtgaagagtctgatgaacctcaaagcttttagtgatgaggctgtcaatagcagcctagtaaaaaaagaaaaaaagatgacagttctacaacctcaaccggttatttataaganacaggaagaaagataaaataaagagaagaaagagaaaatgaactaaagagaaagattaagggtatcagggctcaatgtacttttgaacatt

SEQ ID NO: 410 - DNA, 4227 bp, Homo sapiens
  misc_feature: Incyte ID No: 347796.7
ccgtggcttcagccttggcagggagagtgatgctccaggcaacacggttctgagtcaccttctgacacgagctccctctgcttgctttccaggtcttgaaaatctgaattcacttcagtttagtttatgaattttaggtttcatgataagcctcaagtgtagttggacttttattgaatccttcctaagttattgaaaaaatgtcttttcatggtgaatgacaatatttatgttgcctttagcttcttgaagatttagaagttatataaaaaattaatttaaaagcaaaccaaaagaggtttccattaacattatgatttaaccattgtatttaatttcccaccttatgaaacacaacagcagctccctgactggttcgcctttcattgtgtgaggtcggcacttggactcactcagaactgtcgctcacctgtggctgacacacccagccctggaaacggggccccagacgccacgtcgggatttctgacatgctcagcaggtagaccagaggccgtgtgaccagctcagtgctggtttacggaacaactcttacttttaaaaattacttgttcccccaaattgttgagtgccgccgtttggtttcctatgttttctttccctgttttgattttgctgaagggagaggtggtggtggttaggatcagagctctcctggcatccgtggggaggatttgctggtggtggcttcgggctcatgcccagacacactcactgccccgtctgtccaaggcctccccttcccctttgctggtgggaggagctcgtgtgctccttggccgcttactggaagggcgtttttcagagctgcagggacagggtgagcagctgaagggctaggagggaagccggcccccgctctgcagaagctgcatttcagctgaatctgtgtttcagcctcagttggttgcaccgttagcccctctcctcccggatggtcatgtttttgtcacattagagaataaacagccacacacacatttttttttttcctttaaaacagtaacttggaaatatgaaaaggccagaaggaggagcaagggctgttttctggagtggttgaggtgttgtcctgcagttgtcattgtcttctccaccgggctgttcccatttatttcctgtggaactgaatccctcctccctccactccttgggagcccaggtggtccttggccaccattcaggctttccaagaagccaaccaccttggagattttttttcttgaatttcgctgttttcttctgcttcctttagataaaaagcagctcaagagaccttatcttagggatgagaaaaacatgcatattaattccatctgagtgattgtcagtgtaaggccttttaaaacaaaagcaagttctttgttaggaattggtcaaaattcatctctttctttaagcccatcaactcccaggacggtttgagttactcagttacctaagcttgctattcatccaaatcattttctagagtcactgtataagggtctatgagtagctgtgtatgaataaatattacctgtctacctcaaaatacacatactgctgaagcattctgtacaaccgtgtgttatcacagtgcagttttaagtgtaacgttagaacttaggcattttcctgtgtggcggaataagaaaggattaaacagttacaagcctccaaattcaaataaaattaaatcacagttcagatgaaactgaatatcattgtaataatctcataatatatatttgtaactttgtagctatctttgaaatcacttgactttgcaatggtgctaagctgatagatttaaatacacagacgggcgagtggcgcccgtgtcgatgtcttcagccagtggtgaccctgcttttgtaaccgcgttaacctgacaaaacctcagcagcagaagtccctatttttctaggagttcatcgtgcagacagtcttcactacaggactcggccctggggcctctgcctctcgtctgaccttgcagccttagtcgttggaggctggagcgcaatggccctgccgtctgtggagcctctgggcggccttctttcctttctgtcaacctctcatttcacagaaaaaggctgaatttcattttttccagcatgaaagccaggatcggttagtggttggattctattggttttttttttaaacagatggagttactgtgaagaagttttcacaactatttatgctggtaaaacaaatgctgttaaatcaccttatgcgtcgttttcaacagcagtggggctaattacccggaatacggtctcaccgatgcagttttcatggacatagaaaattcaaatagaatatataatattgaatttaagatttggggggttaaaaaagaaaacttaactttataaaattatttattctattttaagccttctatcatattttcccatccaattgtttggtttcagtggtccagctttatttacaggcatataaaatgaaattgtgagatgttttgcaagcttctttttactttgagtagcttttaatttgtatgtttttatgtggatgaagagcattttttatgcttttgtgcaataggttccaatatgcatttattagacatctgtttaaatggtaatgtagcatttattttgctaaattgaaagggaacatagatggaattccaaaatatgtacattcagctgtttggtttttcgtttttcattgttattattgtgagaatgctgttattggggttgtgtgtgagtgcccgtcagccagtgatgcctcgggccacgctgtggggccacctcagtcctgcctgggtcctggtgccttggaccccacgtgcttgtggccaggctgcccctgggcggggccatgtggcctcagaccacaagagcggagctgccctggcccaagcactgcagctgcctgcacccccgggcttcgcagccttgcttgttttctctgaacagcaacagaacagtgttcacagcgattcaaagggtggcattgggttggacgttctgggtacaagccaacctagtcccacgttgtacgtgaatgtttaatgtgctctcaaaacatggaaaataagtttagtgcacatagctaaatcacaaaacatccaatttctctgtttcctcaggaagtcattactgcgccaccacatcacatgaccttaacatgatcaatgtatttctctgccttgacatttaaatacataaattgagataagtagattagaaaatcattcaaatgataccataatttgtacgggacagggtgcgggcaatggccacgtggccaaggccccgcaggaacgcgccgaggtctccctcaccctccaggtgtccttcgcacccaacagtgcgtctgaggaacgagctgcagtttgagcgttcccctgagatgtgcgtagcctccgtgtaaatgtccactcccatggcttaattgcctatcagacgcattttcccagacgaaagcaatgttgggttggggaagacagtgcagccacccagcctttaccagcagcgtacggcagacgaaggcagtcgaggtgtggaggtgatcacgaagatacatgtgtttgactgtttaatttgaaagtttacattttttatgctttgtgttggtgtgtaatttttgtactcttggtggctagtttttgtcaaatcttttttggaatattgcttaaatgttttgattttatgatagtgaagcttgtattcagtgttttgccaattaatattatatgcttgtaataaaagcaaaagaaaagcttaagtgaaagtgtttctggctggaaatgtattacataaatcatttgtatgagcatgagagatgacttgctcatgggatgagcaatgctgtgggtattggatggaccactcaggcagcctggccgcacacacacacatgcatgctacatatgtgtacgctcagaccacatgcctgcacatatgtccacacaccagcccacggctcccttcctcaccccagccctccccactcccaggttaaccaatgtctcgatttgcttcaggcggcatttgtaaactgtcaccctgcttgcaaaccctcatttaaatgggtccagcatttgctaccagagtttaggccacaaactttgtaaagctcagtttgtctccttgcagaaagaggttgctgcagtttggagctggttatgccaaggaaaatacggctaaaaaagaacttactgattcccataggtgtgtc

SEQ ID NO: 411 - DNA, 8131 bp, Homo sapiens
  misc_feature: Incyte ID No: 411474.17
  unsure 3486-3786: a, t, c, g, or other
ccggcggccattttgggtggaagcgatagctgagtggcggcggctgctgattgtgttctaggggacggagtaggggaagacgtttgctctcccggaacagcctatctcattcctttctttcgattacccgtggcgcggagagtcagggcggcggctgcggcagcaagggcggcggtggcggcggcggcagctgcagtgacatgtccagcatgaatcccgaatatgattatttattcaagttacttctgattggcgactcaggggttggaaagtcttgccttcttcttaggtttgcagatgatacatatacagaaagctacatcagcacaattggtgtggatttcaaaataagaactatagagttagacgggaaaacaatcaagcttcaaatatgggacacagcaggccaggaaagatttcgaacaatcacctccagttattacagaggagcccatggcatcatagttgtgtatgatgtgacagatcaggagtccttcaataatgttaaacagtggctgcaggaaatagatcgttatgccagtgaaaatgtcaacaaattgttggtagggaacaaatgtgatctgaccacaaagaaagtagtagactacacaacagcgaaggaatttgctgattcccttggaattccgtttttggaaaccagtgctaagaatgcaacgaatgtagaacagtctttcatgacgatggcagctgagattaaaaagcgaatgggtcccggagcaacagctggtggtgctgagaagtccaatgttaaaattcagagcactccagtcaagcagtcaggtggaggttgctgctaaaatttgcctccatccttttctcacagcaatgaatttgcaatctgaacccaagtgaaaaaacaaaattgcctgaattgtactgtatgtagctgcactacaacagattcttaccgtctccacaaaggtcagagattgtaaatggtcaatactgactttttttttattcccttgactcaagacagctaacttcattttcagaactgttttaaacctttgtgtgctggtttataaaataatgtgtgtaatccttgttgctttcctgataccagactgtttcccgtggttggttagaatatattttgttttgatgtttatattggcatgtttagatgtcaggtttagtcttctgaagatgaagttcagccattttgtatcaaacagcacaagcagtgtctgtcactttccatgcataaagtttagtgagatgttatatgtaagatctgatttgctagttcttccttgtagagttataaatggaaagattacactatctgattaatagtttcttcatactctgcatataatttgtggctgcagaatattgtaatttgttgcacactatgtaacaaaacaactgaagatatgtttaataaatattgtacttattggaagtaatatcaaactgtatggtgataagtattgttttgattcttatggttaaagggaaatagagccttgcattatattcaacacagccatttgtgtgtgcacaatgcaaactaaggtattctagacctatcttagagcagcatccagtatttgctttctagataatatgcccaataacatgacctagaggggcttctgtgctgtgtagggatttaaccaacttcagtggttcagggagctcaaactatatgtaaaacaagtttagaatgtatgctatctagcccgttatctctgatccttctctaaaaccatttgaaatagcttcattgatcaacatttcataaatgcatctgtggtagaggtagaaagcagcacctttcctaattggcaaatgatcagactaatgtgtgctaatgtttttcttccatgctttcagtcagattcaactattttatcctccacagttgcttaacttggtgttggaggagggtttaagcattaagataggaagcaggaaatttgattgctctaaatttagaaattatatccctaaaaattaaaacatgaatactgggtggtaatgataattgaggcaaatgtatttattttggtgacattttgcatatatgaagattttctgaaataggaccttcaagatcctagggggttttgtttggtttttaattgtgaggaataaaaaatcttctgcccacactggcattttaaggtgactgaggtcaaacgttgtttccttaggttgaaatagcagccaaaacattcttcacgcaggggcttgggatatggctgctggcaacacattttgttgtgggctccttaatttaatgataaaatttaagctaaacacaagccaaaaatgaataggtttttttaatttttatttttcactaaacaggcaattgaaatacatggtacaaaaataagtggtaagataattgtaaaatgaaatggacagaatattcaattttccatctatgaaaatttcacaataaaaatcatagtttactttgtattataggcgtgcttggtggatctattcatcctcacataaggcaactgacaaattcctgaagttaccaatagttattttggtgaagatctttaatgcttcagaagttttgtttttgccttaatacagtataaagggggaaagagttcagaaactattttctaaagtagctaaatgacacaaaacaaatgtcaagatactgtgatgccatgccgtgcacttcatttttacacagtaaaagttgtttaaattgtcagcttattcttggtgagttagcggaaacattacatgaacttaagatgagcatatttacagacttaagtttggaaaattccagcgttcttttccccatggcagtaaagattgggatttacaacaaatttcagcatgccttaagatttgcttctatgtatacgccaataaatgtggttctggaaaaaatatatacccctttatacccccattttcaagtacaaacggttcaaagctactacaggttttaataatctgttcacttagtaaagggaattaccacttgttctaaatataaggtgctgccataaattagtttacatagtgaagaagagtgttcttaaatctaagcagctgcacactctgtgaaatcctttcagaatgatagtcattgtggtctgagcagtaatttcctattcttcgaccttggattgaatttcccttagcctacatcttgcctttccagcatatcttacctcaaaccttctttgtgttccattcccacctaagcttcaaaatagccctgtgttgacgtcgtcttccatttgctgagcttacctatggatctccaagaacccagatcttgaaactgctgatccagctttgagtatcatcacttccctgtggatttaacttccattaattttaagggactactaagttattccagtgtggcatcacagtgcagttagcaagctcagctacttgactctaatttggccatgtttgctcatagaaatgctgctggcagcatcttactaggctgaaacaatttcagcnnnnnnnnnnnnnnnnnnnnnnnnnnnnnnnnnnnnnnnnnnnnnnnnnnnnnnnnnnnnnnnnnnnnnnnnnnnnnnnnnnnnnnnnnnnnnnnnnnnnnnnnnnnnnnnnnnnnnnnnnnnnnnnnnnnnnnnnnnnnnnnnnnnnnnnnnnnnnnnnnnnnnnnnnnnnnnnnnnnnnnnnnnnnnnnnnnnnnnnnnnnnnnnnnnnnnnnnnnnnnnnnnnnnnnnnnnnnnnnnnnnnnnnnnnnnnnnnnnnnnnnnnnnnnnnnnnnnnnnnnnnnnnnnnnnnnnnnnnnnnttcagcttgagttttaaggtaagtcttaaacttaaagcacggcggtataattaacagttgtgttgatactcttcagtagcattcacagccaggtccagggagttagcaccctttagtctcaccttattcagaggatgaacaaaaatatcttagatcatctctaggtaaggtagtactttcttgggaaacagggtattgtgtaacattctgtgcaaattcctgtcagttgaagctgattattagttgaatgggaatagaatgccacattctgcattcaattagtataatattggccaatttgtttctatagggttttcatctccaacttttatgctaattaatacacttctatgcctgtcaaatattagtaaataaatgggtttaatttcctaagggctattcagtaacatactcagtggaaggacatgttcctacttataaatatacatctaagagaaggtaaaatatatcaatttaagaagaggccgtcagacatctctacctttttaaccaactctaggttttcaagaatgttttacatacaggtttataattgacaattatttgctagagtggtttttcccttttaaagtctcagtgtgtatggaactaagatgattaatatggcaaactcataagccattttaattttgatcatgcccttaagcattatgataaagcataccacagcagcatcaggcacttgaaatactgcattttatgtgtagctactgttgaagagctaatctttaaagaatttaatggctattttccagtgactataaagtctcagaaattctgaagcagaaaagtcacattaataataggactttagtttccattgttactgtgctttcctccttccaggttcattcatggcccaacagaactttaaaagtgcttttctgtagaatctgcagttaccagcaataactgatcatcttgctgcaaaaagctatagaattgatgctttgaatggttgatccatagtttttttttttttttaatcaaagtacttatgtgtcaatgccaaagcaacgaagaattcccctttttccttcactattgacagcttcagtttctgtacttactgtgtcatcctatccattcccttccctgagcctggactgctcttccaagggagactaggagtgaagggaggagtcctcccaaagttaccctttaagcttgataattagctccatagccatgctaaagcatgactgtagatccccaagtccctgacacattttcttctaagaaactggttagccaagaaagtaaagacgtaagccctgaagatggcaaaaggtgtcataatctcccaaagtcatctgtatagatgcttcatttaaccctttttcttttgcagacaaagggttaaaaatctcttctttctacctatatctttaaagagggattgacaagcccaaatttccttttatgaaaagacccaaggtttctggccaacaattcacttttttcagtctcttaggtcctcttgcatgcctgagaatattgagtattcggaatctcctaccagcccttggtaaatgaccctaccaggtggaatagtttgagctttatctgctcttttttaatgggatagaggggaaggcaacacgtcttattttatcaaaaattgcaaagctacacgctctttgtggagaagcaccaaaaggaaaaccttagtttggaaggattcattgtaaataaaaatagtaactcagccctccattcagggaggagaaaggcattttaaagctagtatattgaaggtttcccccttgacttcagtgttgaatggctcttgcaaggacttcttgaaggatttttttctcactagccagtgtttggccgacaggttgcacctctgcctgagaagatgccaggttaaaccccttcacatgggtgctccattgccgccatgggctttttgtcagggataagggtgcagccagccagcatgtccagagaggccaagatagagtcatacaggcgatctgcgtggctctccagctcaccagactgctttgcgatcctcccaaggacatcctctaaaactggggtgttctccaacaggcactgaagaagaatctcccccttctgtaagacactctccgtcagagactgatgttcatctatatctttcttaaattgccggtaaagctgcagagaagacttgagacttgtaagattggacctggctgcagtcccgtggtcagtaacatctgcaacattatacagccagcagatcagctcttccagctgacagcaaaatgtcttcacacattgcaccagtgattcttttccctgttctcctcctttcctgggaagctgcccttcaacatctgggtctgagaatggccaccggtccaacctagctggcaaggaggggcgtgttttcagcagtccagaggagaccccgagggcctggctgctccccagactgccttcccctgcggagtcgtgggcacggacgaaggagcgcaggaaacagggattctggccctcaggatccccagatccttggagggcagctccagggggaagctggctttggctggagcttgaagggaaggaagctggcccatcactgtctgacacttccaaggggctctgccctttgatatccccagtgggcagggtaaccaaggtagaaatggatcctagatacgaaaccaggctagaaacctgtgtcagccgagcggggagggcaagatactcgtcatcactttccacttcctcttctgatttccacctagactctgtgcaggtagggcgccgggcactctggctggtcctcttctccctctctggcctgggcgagggccaccctctgtcccgtgtccttagctggggagagcccatatcaaggtgcttgcctatagtcagccggtccttcgcacccctcagggctggctctctgcgctcccaacgagcatccctactgcctggggctctgggggtagatgcaggttggctccaagatgccaagcccatgccaccctgtttctggggtactctggagggccactgcttaaggcttggctctctgggcccagaaaatggcagggcagtggcctctgctggtgggcagttgggggagacattagtaggtgatttgagggtgcttgctggagagacagagaagctatccaggtctaccccggagtcctgcaggacagggtcagctggcacacggctatcaaggtgctttgggagctgaggcccgggcctcagtgggtaagtatagtcaagcagatcttcatactctttatttgggttccagagaggggagtggcggtcgggtgatggaggcagggaatctggcagcacacaggcccagtactcagcctggaaggagaggcgtctcctgcctagcccagaagcatcacccccagagaacacaggctgtggtgaccactggggccgaggtcctagccccaccacagaggaaggttcctgggggacgaccggctccagggaggaggagaccttggccagagaaccaccacgaggctccgccctctcctggtgaccctggagactgctgcctgtggaggaagcagagatgctgcagctggaaggctgagctgcggaacctgggctcagcacggacttccactgtgacaggcaagagagacctgagctgtgaggctgctggctgaggtccagtgcctggggcaaatctgctagggatggatcatcttcggtatcagcatcatgtcctgagcaaatagttgttgttctgggaaggctcagagtctgagggaactcctcggaggaagaaagcttggtcttctccacctggctttccccggagagcagaaggtctccagaccccatggtggcaggaggcaggccactgagtgcaggctcagacctctcagctacgggctctctgttggcatcactggcctgtggctggtgggctctagaggggccgccagggtcagtcccaatccagcaagtaggggcaggtatcccttctgccccccatacaggggagatgagccctccctcagcttccaggcgtgggggctgctccccactcatgggccctgggatgtccagctcccgctccctgcagctccctctcccataggactgggcctttgtgtcttcagatgcttccgcttctgccttttcttcacccagggccattgagactccctacctaggtcagggttctgctgaagacttcagcttcctaccgcaccgcgaaacgttcgcacgtccggagcggtctcagcagccccatgcgctggccccgagctggcggaccctgactgcaactgcggccctccaaccgcagcccaaaacgcgcagggcaggaccgagc

SEQ ID NO: 412 - DNA, 145 bp, Homo sapiens
  misc_feature: Incyte ID No: 027434.1c
aacgacagcctacagtaagtcttacctcggctctcctgccctgggagcaggaaggcatctttccgtggcaaatagcacccgtcaagaccccaaaccttcctctactgcagcaccccagggaatttcacagctgaaaatgctttgt

SEQ ID NO: 413 - DNA, 606 bp, Homo sapiens
  misc_feature: Incyte ID No: 979488.1c
  unsure 271, 284-285, 295-391: a, t, c, g, or other
ctctttcaggaactggggtcatttcatcccaaacgctgaccaaggttgtttataaactcttagaaaaacataacataaatgaatcttactgccaagtgacaagtttctttttatgtttggttgtaaattatttcagaaacctcatttttgtttaaaaagcagatttgtatgaacaaaattgagtgaacaaattgagtccatttaatattaaaatgttgaaagggcttacttggtgtagatgtttcaaacatcaaaaatctagcttttcggngctggatgcagtnnctcatgcctnnnnnnnnnnnnnnnnnnnnnnnnnnnnnnnnnnnnnnnnnnnnnnnnnnnnnnnnnnnnnnnnnnnnnnnnnnnnnnnnnnnnnnnnnnnnnnnnntacctccttgtttgcacaatttgggccactcacaagagtgtataccctgtgataaacagttacctacattctcctctgcatgcttgtctttagaggaaggaaatgtattaattgcccaaagtaatatattgtgttaagatgtgatatatactggggaaaaaaaaagtgtatattgacatttctggaataaaccactttgattcccagttaaaaaa

SEQ ID NO: 414 - DNA, 242 bp, Homo sapiens
  misc_feature: Incyte ID No: 213988.1
aaataacttttacttctaaagttgggttacatatgccagattggtttaaaggtagtacaccaattccttctagaatggatgttctcaacctatagtaaataactgatgatccggcattttaagtgtgcagatagattcatcggcaggttccatgatggttgatctttctctgaccctttacgaatgttaagagattaatttgctaagtataaactgaatattattaaattttaatggtattt

SEQ ID NO: 415 - DNA, 756 bp, Homo sapiens
  misc_feature: Incyte ID No: 263336.62
gcccagcccaggaacgcgggcggtgcggactcagcgggccgggtgcaggcgcggactgggcctctgcgcccggcccgacctccgtctataaatagagcagccagttgcagggctccattctgctttccaactgcctgactgcttgttcgtctcactggtgtgagctccagcatcccctttgctataaacactgcttgccgcgctgcactccaccacgcctcctccaagtcccagcgaacccgcgtgcaacctgtcccgactctagccgcctcttcagctcgccatggatcccaactgctcctgcgccgccggtgactcctgcacctgcgccggctcctgcaaatgcaaagagtgcaaatgcacctcctgcaagaaaagctgctgctcctgctgccctgtgggctgtgccaagtgtgcccagggctgcatctgcaaaggggcgtcggacaagtgcagctgctgcgcctgatgctgggacagccccgctcccagatgtaaagaacgcgacttccacaaacctggattttttatgtacaaccctgaccgtgaccgtttgctatattcctttttctatgaaataatgtgaatgataataaaacagctttgaccaaaggcagcttctgacacaccagccccaggacctggggcgactggaggaagccaggcgagtggggcccaggactggttccagtgagagaaaccaaccacaggcacccaagcactaccagacaaagcgtattaaacagaacacttttg

SEQ ID NO: 416 - DNA, 644 bp, Homo sapiens
  misc_feature: Incyte ID No: 153860.6
tacagacccaaaaaaccaagccaagagggcttgggggtgatgcaggcacagcagatggccgaggcaggacactgcagaggaagataatgaagagatctctaggcaggaaatccacagctcctcctgcacccagaatgggaaggaaagaaggccaagggaattcagattctgaccagccaggccctaagaaaaaatttaaagctccccagagcaaggccttggcagccagcttttcagagggaaaagaagttagaacagtgccaaagaacctgggcctatcagcgtgtaagggggcctgcccctcatctgcgaaagaagagcccagacaccgggaacccctgacccaggaggctggaagtgtcccccttgaggacgaagcctccagtgacctggacctggagcaactcatggaagatgttgggagagagctggggcagagcggggagctgcagcacagcaacagtgatggcgaggacttccccgtggcgctgtttgggaagtagctggtgctcctctgctccctctttttctcccttctctggggcgcaggagggagaagttgctaagtgctgggtctgttcattggctatgaggttcaaatgtgtgtggtgcagtttctgtgttaataaagcaggttacagtcg

SEQ ID NO: 417 - DNA, 451 bp, Homo sapiens
  misc_feature: Incyte ID No: 154178.1
gctggggcctgagtccctctgaagtgttctgtgagttgtggctgtgttcacgtctctccgtcagccagactgtgggtgccgtgtccctgagcctgggcctccctccggccttttgcgatctgtgcattccctccagacggcagctcctcactcccagggcccctctactggggcaccagcaaggagggaggcagaggggccaggcactgagtaggggaggggctggcagggaccctctacctggccccttgggaaggacacagacccagatggagcctgtcccctcgacacctggcctgggcccctccccagctctgctggaataaatcctcctgtaacaacctcccgctgctgtcccagcgtctgaagaatgaacacagctccccataactttccaggcgctatccgatgggacagtttgtaataaaattgcttctaaaaacataaaaaa

SEQ ID NO: 418 - DNA, 1913 bp, Homo sapiens
  misc_feature: Incyte ID No: 337888.3
aacccttatctggttctgaccagtgtgcgtgtaactttatgatctgaggggaaaaatggcttttgggtttttgtttatttttttgataatgactggacatcagaagaggaaaaaaactcaaaacaaaagcgagagagactattgccatatgaactcaaaagctatcatggtgttcactctacatatcaggttatggtgtctctagaatctgttgtttgtttcctataagatgctttgctgaacacatagcaaaattcatgtgacggatgataaattgattcgaaaagctggtcccccaggatctaatttcagaatttaccacccaaacccggaacagatgggtttagggctggtgttatcagagctattggctttacgtaacaatattgttcctgtccattcacccagccaaattgtgttaaagaggaaagccccacaaactaaaaacagcctttcctagggaagaggaaggggaggtgggctggatctgtgactgattgaaatgcatgcaaataaaaaagacaatattaaagtctgttatcaaaccagacagtaggggagttcaactcgtgatggaaccacaaaaggtcacacaagccaaccatgtcatgccagagtacaaaacacatagttctttccccgccccgaatgtgacaatggttttcatagtggtttaattttgtagcctgacatttatggataactctgtccttccatttgctcacttctctcttcacccatcttttttaaaaacaaataaatgaataaagctgctgtgacacacacacaaaaggaatttaatagtataatatatagatgggataaatatatatacagatatatttatcatggtatgtttgatgggatgactgacacaggaaatctgttaaagtcttaaaatggaatgagaatgttgttttaaaagaaaatagcaaaacaacaaaaaagcaaaccttaaaatgtgaagaaagtgtgaattttagttttgtcacagttaactgtgtcaaagagaattaaaaaaaaaaacttcagattttgtttacatattttactacatttttgctggtataattccttagccacctatgtacatactgctttaagaaatgtttttttcctgtttatttctgtttggtttatattctggttgtctttttctttttgtaaagaggaaacaatgtacagaaaaacaataaactggttgtatggccatagctatccgaaaagcaagagacaaagcaagacaaatattcacacaaaaatgaagtgtgtcctctggagggtcatatatacaatttcttttgtacagatgaaaatcaatcagctgcttagatttagaaatctactcttgctggtctttgtaagttgcatgaatatttgactttgaaaaaatatcttaacgacatggggcaaaaagtgcaatctaaatggtagcctttactaatgtgtgtggaaagaggtgttcctcattatctaatatttcaatgtgttaagagtttaatttttttgttatcattaaaaaagacaggattataaagagatatcaaagcacgattttagataacctaaacggcccagcctatacgaagttgattatatctcgatgtctgtaaaagattgctgttcttggagtcttgaggtcttgtgaattgatttcctgctttctttcatttttttcaatttaagtaataatacatttgttatattcctttcagtgtaagtttctatttggacaattttatgggaacatgtgcattctctatgtgagcttctatcatattcctgttttattagcagaacctaaaggaatttatttaatgatgttgtgacattactgctttttcttttttcttttcttagttcatatttgcattttcgttcaaggatatgcttagcaataaaatgttcttccc

SEQ ID NO: 419 - DNA, 605 bp, Homo sapiens
  misc_feature: Incyte ID No: 240009.2c
aggtaatgaaatcagtccttgaatgaaagcagtgcccttgagaagggatttttttttaaatatacagtaaaatatttcgtgggaacctaacactcacatagcatatggtttattaataatgcatatcctttctaatcacttcttcaattctttttgctgcagttctgtgctaaaatggggttgtggttaagtgaacgagaactctgcctacctaagaagttcattgtgttctaagtggaaggagagttactgaagggaatgtgaatttttaccgtttgtacttaagatacattggttgtctaaaatggctctggataacatttttgggttaaaaaatgtaatttaaagccaccatagaaagtattttctgatttactgtccaaatgaattttgttgttaattgagaagtcaataaaatggattaaactgacagaaaaaaaacatatatatatatcccaaggtgtaatttactcttttgtcaggataaaatcagaaaaatggctgattttagtaaatgaaatttttagcaaatctttcattcatgtagtttataattattgtgtcaagcagtgctgtttacattttaagcatcatacaaaaaagat

SEQ ID NO: 420 - DNA, 1275 bp, Homo sapiens
  misc_feature: Incyte ID No: 160011.1
  unsure 240, 772-961, 1050-1156, 1194: a, t, c, g, or other
gtgacaatgagggttcagctgaggttgtagaccaggaattatgtagaacctgggtataggagcagacaaggcaggctagagcattagcacaggtttgggattttcatgggcagttgtggcagagggatgaaggtatatggatatggaaggtactggtgagagtggttcaaatgttgagccatctggagtccaggatgggtatggggggaagatagatcagcagaaggcaagtggaccaanagacaatgtggggctcaagagactgtggtcttgataaagttgaagaacagatagagcaggagtgagctgtggttggaaagtgggaattcttgaatttaagatttcagagggggcagttctggttggtcaggtccataaatgaaaaagaaagggcagatgtacaatattggtagttccattttcttaagatactatctttatttcctcaaggatcttcttacttccctggattttgatattacttggtctcattattatgccaacgtgcctttctcatcacaatattctgctgcctctccacaagcaccagtttttaaatctggtatggttctcatttctagtgtgcctgtgctatccttgctttttagctgacaggtaactgataatacctcttttatccaggagccactgatttttttgcgcagtgtttcagccgtaatcacacatatgggaattcatttccacaatgcttttgatttgtctgtttagtactttatagttgctttggttataattctgcctagactgagcnnnnnnnnnnnnnnnnnnnnnnnnnnnnnnnnnnnnnnnnnnnnnnnnnnnnnnnnnnnnnnnnnnnnnnnnnnnnnnnnnnnnnnnnnnnnnnnnnnnnnnnnnnnnnnnnnnnnnnnnnnnnnnnnnnnnnnnnnnnnnnnnnnnnnnnnnnnnnnnnnnnnnnnnnnnnnnnnnnnnnnnnnnnnnngtttggcgtatagtcaattctcaataaaagatactgttggggtgacaatgacagtgattgcaatattggcagcatatgcaaaattgcannnnnnnnnnnnnnnnnnnnnnnnnnnnnnnnnnnnnnnnnnnnnnnnnnnnnnnnnnnnnnnnnnnnnnnnnnnnnnnnnnnnnnnnnnnnnnnnnnnnnnnnnnncttcctcaagactgtctaagaaagggtgtgtgcaagangcttaacatcttatagttcaataaagaccaggaaatatacaagttgaggaaatattgaggtttcaggaacctgtatagctt

SEQ ID NO: 421 - DNA, 1889 bp, Homo sapiens
  misc_feature: Incyte ID No: 332919.4
  unsure 1655-1681, 1882: a, t, c, g, or other
gctcgagggagtgttacttcggttcccaggttggaagattatctcacccggccccagctatataagctgaccggtgtggaggggcccagcagggccaactccagggattccttccacgacagaaaaacatacaagactccttcagccaacatgatggtactgaaagtagaggaactggtcactggaaagaagaatggcaatggggaggcaggggaattccttcctgaggatttcagagatggagagtatgaagctgctgttactttagagaagcaggaggatctgaagacacttctagcccaccctgtgaccctgggggagcaacagtggaaaagcgagaaacaacgagaggcagagctcaaaaagaaaaaactagaacaaagatcaaagcttgaaaatttagaagaccttgaaataatcattcaactgaagaaaaggaaaaaatacaggaaaactaaagttccagttgtaaaggaaccagaacctgaaatcattacggaacctgtggatgtgcctacgtttctgaaggctgctctggagaataaactgccagtagtagaaaaattcttgtcagacaagaacaatccagatgtttgtgatgagtataaacggacagctcttcatagagcatgcttggaaggacatttggcaattgtggagaagttaatggaagctggagcccagatcgaattccgtgatatgcttgaatccacagccatccactgggcaagccgtggaggaaacctggatgttttaaaattgttgctgaataaaggagcaaaaattagcgcccgagataagttgctcagcacagcgctgcatgtggcggtgaggactggccactatgagtgcgcggagcatcttatcgcctgtgaggcagacctcaacgccaaagacagagaaggagataccccgttgcatgatgcggtgagactgaaccgctataagatgatccgactcctgattatgtatggcgcggatctcaacatcaagaactgtgctgggaagacgccgatggatctggtgctacactggcagaatggaaccaaagcaatattcgacagcctcagagagaactcctacaagacctctcgcatagctacattctgaggcaaacgacagactcttaatcagtaaatgttcactggcattttgaaggcatggcccaagagaagagacactagccataaaatctagtttctatttatcaacgtgttgtgaagatgtacctaatgaagttttgagaaagcacagggttataggtgtttaaatttcctttagtgaaactcttatttatttttatgtattcctgtttatttatttactgccacgctactgatattcagaccttcatgatcatccatctggtgagcagagcttcatttgtatataacactttcagagccttcccacccataggtagttcttaaaccaggtgaaagagcaaagttcaagtgcctacttatgtgtcattcgctcatgtaagagtttttaagagagggctgattatcacagccctcttttctcctgaatttttaatgcagaagtttgaatgaagcaagggaaggcatgtagggacaggaaaggaaacaatggaaggaaagtgattctgtgaaaaggacagtgaagccagctattttacccccaggctggannnnnnnnnnnnnnnnnnnnnnnnnnnaccgagtacacagagtacccaagtgaagagaacgtcatgagtgtaagtgcaaatcagtggaaggagcggcaaactgggacatgcagaattgaatttgctcaaaaaagatgaaaggaaatgcaaactgtaaatgtataaatgtatattgtattgtatgtacattttatattcataataaaggcaatcaaactctaaaaaaanaaaaaaa

SEQ ID NO: 422 - DNA, 258 bp, Homo sapiens
  misc_feature: Incyte ID No: 006233.1
gctcgagaaaattctgagatttagaattttgcttatttccaaacaactgtgaatgtctagagttggaggcaaagacttctagtcccaatagaaggcaccaatctactgtctggaaaaatcctttagccctgtgtccctctccttctagccccactgtgaaagaacatatcattctctagtcataatagtgaccatcgtgggttaaaaacccttactatttgccaagtctggtgctaagcatttcatttaatcctcatc

SEQ ID NO: 423 - DNA, 2127 bp, Homo sapiens
  misc_feature: Incyte ID No: 245532.17c
tttttttaaagtcactaagaatcatttattgagcacctgctgtatattcagcattgtgggaggagctgtgaaagacacagaacagtacagggtgtggtccctgccctcgagaggtttacagtctaggtggagaaacgggaaccaggacacatggggagccgagagaaaacagtccaggccagtatgttacaggagctggaaggtgtttggggtcagaccccaatactccaagtacactaagcacttcagtgcctccaggggctcaacgttagtgccaggaaagacaactactcccagccccatatgagcccacgtggcatgccctgtccatagcctctactgccaccatcttaaaatgtctgactccttgttccgctgctaatcaaagtgcaatgaactggggagggatggggtggatgaggaaggtcgctggacgatttgaggggccagtgtctccctcctagaaagatctactcccccatcatatacccctaacacagagataaccccactcaagggggcctgtgccaccacatgggaccctcacccccacagctagaggagggggcggtcgctgcttgagctgcctgaggtagaactagggtgcccttcttcttgtgtgtcccttccccttccagtccattgagctgggggtgggggtgggacaggcacctcagagccacctggagctgagagggtactgaagggaaaggacaagggggagggacagcagcagaggggaattgcagagcccagctggagaagaagggtagctggggctcctcaaaaggtacaggggagccaaagagggaaaaggctcaacactgagacgggctccccagtgcaggtcagaggggccatgagggcaggcggggtggtctgctccaggaccccaccttccccctgccttcacaagacagaggggggtatcaagagccaggagggtaccaggtccccagctcagccctaggctgtgctcacttcagggtcaccctgcccaaccttagaggaggtgaggggactccaaagtttttgatgatgcccccactcggtgaggccccttcaaagtgccatctgtttacttctcaaatgaaaaagaattcaggtctgagtgtccaggaaagggggtgaatttcataaccgcctgtgacagcgatgggaaggagccacacccctccagagggtaccacccagcggacaagtggggaggaggaagtagctggcatgaagccggcccacccaacctccgggagagaggaaaaggagaacacgggatgaggaggctttaaatagtatttcataaaataaaaatgcccagcactcttaggaacctctcattcaaccgcctagtttttgtttaaataattctaatgccagaggctggggggcagggggcggccagggtatgtacatgaggaggtgtttaaattaaaacacaaataataattaagacacacaaactgagactaaggcagaagatgtagagcgggcctttgaggccctcgcgcttccaggactgcaggcttcctgtgggcggattagggcttcctcttggagaagatcagccggcgtttggagtggtagaaatctgtcatgctggtctgccgccgttttcgaccctgagagtctccaggtccacctggggacccttcagcctgctcccctgagcgaggcacaagggtacaagacagtgacaggtccacatggtcttcctctgctgtcccctgcagcagagcaggtgaggtgccaggccgcctgcctcctcccaactcatcccggcctcgccggggccccgtgggaaggtagagcttgggcaggccaaggccccgcacacgctcccaggcgaagtcaccctccagtggtgtctcggtgacaaagtcgaagttccatcgctcacgggcctcctggatgcagcccgccattagcgcatcacagtcgcggctcagctgctcgctgtccactgggccgaagaggcggcggcaggccttgctgccgcatgggttctgacggacatccccagccggttctgacatggcgcctcctctgagtgcctcggtgcctcggcgaatccgcgcccagctccggctccacaaggaactgacttcggcagctgctcacacctcagct

SEQ ID NO: 424 - DNA, 608 bp, Homo sapiens
  misc_feature: Incyte ID No: 205486.1
  unsure 501, 544, 583: a, t, c, g, or other
tgtttttaatatatattatatatatacattacaagttttctacaggaaacaacactcagcatattcctaaatactagtagaactctgggcttttacaactgtttggtggagttttgtctgagcaagtttccaaatgttttataggtgcctgaaaaggtaggtgaacatcaggggatatccccaagagcaaatatacagaagcaagaagtgttagaaccatctttgcatctgtgtgaatgtgcaggaaacatgcattgaagtgtggctgtaatacagggactgtgtaggagagtggtgggtggggtgggaccaccttggagggtcctgaatgccacattaaaagatttcggttctacagattatgaaggacctaacccagaggtggtggttgagatgctgtattaaaagtaacaccttaaatgtggcaggggattaagtgagatctaaatttgaaaggttggttttcaacataagtgtggggaaagctccctgatgccaacnttgctggtcctgaattgtggcacactgtcaccacctggtggtnacatagccaaattgtagggctaatggatttagccagagncctggttgtagagaaatttcttcat

SEQ ID NO: 425 - DNA, 2748 bp, Homo sapiens
  misc_feature: Incyte ID No: 987927.13
ctagtattctactagaactggaagattgctctccgagttttgttttgttattttgtttaaaaaataaaaagcttgaggccaaggcaattcatattggctcacaggtatttttgctgtgctgtgcaaggaactctgctagctcaagattcacaatgttgaaagcccttttcctaactatgctgactctggcgctggtcaagtcacaggacaccgaagaaaccatcacgtacacgcaatgcactgacggatatgagtgggatcctgtgagacagcaatgcaaagatattgatgaatgtgacattgtcccagacgcttgtaaaggtggaatgaagtgtgtcaaccactatggaggatacctctgccttccgaaaacagcccagattattgtcaataatgaacagcctcagcaggaaacacaaccagcagaaggaacctcaggggcaaccaccggggttgtagctgccagcagcatggcaaccagtggagtgttgcccgggggtggttttgtggccagtgctgctgcagtcgcaggccctgaaatgcagactggccgaaataactttgtcatccggcggaacccagctgaccctcagcgcattccctccaacccttcccaccgtatccagtgtgcagcaggctacgagcaaagtgaacacaacgtgtgccaagacatagacgagtgcactgcagggacgcacaactgtagagcagaccaagtgtgcatcaatttacggggatcctttgcatgtcagtgccctcctggatatcagaagcgaggggagcagtgcgtagacatagatgaatgtaccatccctccatattgccaccaaagatgcgtgaatacaccaggctcattttattgccagtgcagtcctgggtttcaattggcagcaaacaactatacctgcgtagatataaatgaatgtgatgccagcaatcaatgtgctcagcagtgctacaacattcttggttcattcatctgtcagtgcaatcaaggatatgagctaagcagtgacaggctcaactgtgaagacattgatgaatgcagaacctcaagctacctgtgtcaatatcaatgtgtcaatgaacctgggaaattctcatgtatgtgcccccagggataccaagtggtgagaagtagaacatgtcaagatataaatgagtgtgagaccacaaatgaatgccgggaggatgaaatgtgttggaattatcatggcggcttccgttgttatccacgaaatccttgtcaagatccctacattctaacaccagagaaccgatgtgtttgcccagtctcaaatgccatgtgccgagaactgccccagtcaatagtctacaaatacatgagcatccgatctgataggtctgtgccatcagacatcttccagatacaggccacaactatttatgccaacaccatcaatacttttcggattaaatctggaaatgaaaatggagagttctacctacgacaaacaagtcctgtaagtgcaatgcttgtgctcgtgaagtcattatcaggaccaagagaacatatcgtggacctggagatgctgacagtcagcagtatagggaccttccgcacaagctctgtgttaagattgacaataatagtggggccattttcattttagtcttttctaagagtcaaccacaggcatttaagtcagccaaagaatattgttaccttaaagcactattttatttatagatatatctagtgcatctacatctctatactgtacactcacccataattcaaacaattacaccatggtataaagtgggcatttaatatgtaaagattcaaagtttgtctttattactatatgtaaattagacattaatccactaaactggtcttcttcaagagagctaagtatacactatctggtgaaacttggattctttcctataaaagtgggaccaagcaatgatgatcttctgtggtgcttaaggaaacttactagagctccactaacagtctcataaggaggcagccatcataaccattgaatagcatgcaagggtaagaatgagtttttaactgctttgtaagaaaatggaaaaggtcaataaagatatatttctttagaaaatggggatctgccatatttgtgttggtttttattttcatatccagcctaaaggtggttgtttattatatagtaataaatcattgctgtacaatatgctggtttctgtagggtatttttaattttgtcagaaattttagattgtgaatattttgtaaaaaacagtaagcaaaattttccagaattcccaaaatgaaccagatatcccctagaaaattatactattgagaaatctatggggaggatatgagaaaataaattccttctaaaccacattggaactgacctgaagaagcaaactcggaaaatataataacatccctgaattcaggacttccacaagatgcagaacaaaatggataaaaggtatttcactggagaagttttaatttctaagtaaaatttaaatcctaacacttcactaatttataactaaaatttctcatcttcgtacttgatgctcacagaggaagaaaatgatgatggtttttattcctggcatccagagtgacagtgaacttaagcaaattaccctcctacccaattctatggaatattttatacgtctccttgtttaaaatgtcactgctttactttgatgtatcatatttttaaataaaaataaatattcctttagaagatcactctaaaa

SEQ ID NO: 426 - DNA, 726 bp, Homo sapiens
  misc_feature: Incyte ID No: 025423.3
  unsure 437, 464: a, t, c, g, or other
aatgcttttgaagacaaagtaagaatttcagtattgacgttagacaaagaattgaagtcaggaaatagtgcatgacaaaagataattttgtggtaataaaagcatatgaacaaagcaaagataaaagtgtattgccttcttaattaaatgtagcttttgttgtggggaaaaaaaataagaaaagtatactgccttaaacactagataacactgtcaaaatatataaagcaaaagttgttagaaatacaagataaaattaaccagaaacagaatactgaatactagttggaaactttaagttttttcagcacatgcagtttcttattaagtagaaagtctcagttgtagacattgtatacgtaaccattagtacttacgtgacgagaccagagttgttctgtgttcagtaaaagttcatagttatcttcattaaactnggtaagaatgaaaataagtgaacttangaaatcaagaagagaaagtaaaagcagatccacagagaaaagcaagataataatgactggaaagcacgttttctaagtattatataaagaaacaaatgtcctaatatttctagacaatatagcagaatgaaaccaggagttgcttttctgacaagattaactagaacatctagcaaatctaattaaggaaaagtgagtggaaatccataaacatcactgatgagtaagaaaatggatagaaccacaaaagttataaaatttt

SEQ ID NO: 427 - DNA, 1956 bp, Homo sapiens
  misc_feature: Incyte ID No: 1091415.2
taaacacagctgcgatgacgaaccctttcacgggaaggaacatgcgagcccagaaaagtctctcctggtcttgggatggaggtcacacgaagcctccgcaaggcaaggacttttgcggcttctgcaaccaagcgggtcttacccccggtcctccgcgtctccagtcctcgcacctggaaccccaacgtccccgagagtccccgaatccccgctcccaggctacctaagaggatgagcggtgctccgacggccggggcagccctgatgctctgcgccgccaccgccgtgctactgagcgctcagggcggacccgtgcagtccaagtcgccgcgctttgcgtcctgggacgagatgaatgtcctggcgcacggactcctgcagctcggccaggggctgcgcgaacacgcggagcgcacccgcagtcagctgagcgcgctggagcggcgcctgagcgcgtgcgggtccgcctgtcagggaaccgaggggtccaccgacctcccgttagcccctgagagccgggtggaccctgaggtccttcacagcctgcagacacaactcaaggctcagaacagcaggatccagcaactcttccacaaggtggcccagcagcagcggcacctggagaagcagcacctgcgaattcagcatctgcaaagccagtttggcctcctggaccacaagcacctagaccatgaggtggccaagcctgcccgaagaaagaggctgcccgagatggcccagccagttgacccggctcacaatgtcagccgcctgcaccggctgcccagggattgccaggagctgttccaggttggggagaggcagagtggactatttgaaatccagcctcaggggtctccgccatttttggtgaactgcaagatgacctcagatggaggctggacagtaattcagaggcgccacgatggctcagtggacttcaaccggccctgggaagcctacaaggcggggtttggggatccccacggcgagttctggctgggtctggagaaggtgcatagcatcatgggggaccgcaacagccgcctggccgtgcagctgcgggactgggatggcaacgccgagttgctgcagttctccgtgcacctgggtggcgaggacacggcctatagcctgcagctcactgcacccgtggccggccagctgggcgccaccaccgtcccacccagcggcctctccgtacccttctccacttgggaccaggatcacgacctccgcagggacaagaactgcgccaagagcctctctggaggctggtggtttggcacctgcagccattccaacctcaacggccagtacttccgctccatcccacagcagcggcagaagcttaagaagggaatcttctggaagacctggcggggccgctactacccactgcaggccaccaccatgttgatccagcccatggcagcagaggcagcctcctagcgtcctggctgggcctggtcccaggcccacgaaagacggtgactcttggctctgcccgaggatgtggccgttccctgcctgggcaggggctccaaggaggggccatctggaaacttgtggacagagaagaagaccacgactggagaagccccctttctgagtgcaggggggctgcatgcgttgcctcctgagatcgaggctgcaggatatgctcagactctagaggcgtggaccaaggggcatggagcttcactccttgctggccagggagttggggactcagagggaccacttgggggccagccagactggcctcaatggcggactcagtcacattgactgacggggaccagggcttgtgtgggtcgagagcgccctcatggtgctggtgctgttgtgtgtaggtcccctggggacacaagcaggcgccaatggtatctgggcggagctcacagagttcttggaataaaagcaacctcagaacacttaaaaaaaaaaaaaagg

SEQ ID NO: 428 - DNA, 1075 bp, Homo sapiens
  misc_feature: Incyte ID No: 1091415.16c
  unsure 929-974, 979, 983: a, t, c, g, or other
gagacaccgtgcctggccctgggaacatgtttacatggactttgttcactttttaaaacaaactgagggtaacttactagatctgtgaactaaagaaagagaaaaaaaagaaagaaaacaaacaagaacaaagaacaaagtgttctgaggttgcttttattccaagaactctgtgagctccgcccagataccattggcgcctgcttgtgtccccaggggacctacacacaacagcaccagcaccatgagggcgctctcgacccacacaagccctggtccccgtcagtcaatgtgactgagtccgccattgaggccagtctggctggccccaagtggtccctctgagtccccaactccctggccagcaaggagtgaagctccatgccccttggtccacgcctctagagtctgagcatatcctgcagcctcgatctcaggaggcaacgcatgcagcccccctgcactcagaaagggggcttctccagtcgtggtcttcttctctgtccacaagtttccagatggcccctccttggagcccctgcccaggcagggaacggccacatcctcgggcagagccaagagtcaccgtctttcgtgggcctgggaccaggcccagccaggacgctaggaggctgcctctgctgccatgggctggatcaacatggtggtggcctgcagcgggtagtagcggccccgccaggtcttccagaagattcccttcttaagcttctgccgctgctgtgggatggagcggaagtactggccgttgaggttggaatggctgcaggtgccaaaccaccagcctcctgccggggtcaggggagagggaacatggtcaggtctttgagccaccgatggggctgaaaggagatagggatagggttgaggatgaggcaggttggggaccaggctgggctttggacttgacnnnnnnnnnnnnnnnnnnnnnnnnnnnnnnnnnnnnnnnnnnnnnnacatnaatnaataaataaacaaacacataagtaaataaaagtaaagacggtcaagacccttttcaggatgggaaaactgaggccagataggctaagttagt

SEQ ID NO: 429 - DNA, 4637 bp, Homo sapiens
  misc_feature: Incyte ID No: 230058.2
ggaagatggcgggcgggctgctctgaagagacctcggcggcggcggaggaggagagaagcgcagcgccgcgccgcgccggggcccatgtggggaggagtcggagtcgctgttgccgccgccgcctgtagctgctggacccgagtgggagtgagggggaaacggcaggatgaagttcgccgagcacctctccgcgcacatcactcccgagtggaggaagcaatacatccagtatgaggctttcaaggatatgctgtattcagctcaggaccaggcaccttctgtggaagttacagatgaggacacagtaaagaggtattttgccaagtttgaagagaagtttttccaaacctgtgaaaaagaacttgccaaaatcaacacattttattcagagaagctcgcagaggctcagcgcaggtttgctacacttcagaatgagcttcagtcatcactggatgcacagaaagaaagcactggtgttactacgctgcgacaacgcagaaagccagtcttccacttgtcccatgaggaacgtgtccaacatagaaatattaaagaccttaaactggccttcagtgagttctacctcagtctaatcctgctgcagaactatcagaatctgaattttacagggtttcgaaaaatcctgaaaaagcatgacaagatcctggaaacatctcgtggagcagattggcgagtggctcacgtagaggtggccccattttatacatgcaagaaaatcaaccagcttatctctgaaactgaggctgtagtgaccaatgaacttgaagatggtgacagacaaaaggctatgaagcgtttacgtgtcccccctttgggagctgctcagcctgcaccagcatggactacttttagagttggcctattttgtggaatattcattgtactgaatattacccttgtgcttgccgctgtatttaaacttgaaacagatagaagtatatggcccttgataagaatctatcggggtggctttcttctgattgaattcctttttctactgggcatcaacacgtatggttggcgacaggctggagtaaaccatgtactcatctttgaacttaatccgagaagcaatttgtctcatcaacatctctttgagattgctggattcctcgggatattgtggtgcctgagccttctggcatgcttctttgctccaattagtgtcatccccacatatgtgtatccacttgccctttatggatttatggttttcttccttatcaaccccaccaaaactttctactataaatcccggttttggctgcttaaactgctgtttcgagtattaacagcccccttccataaggtaggctttgctgatttctggctggcggatcagctgaacagcctgtcagtgatactgatggacctggaatatatgatctgcgttctacagttgggagctcaaatgggatgaaagtaagggcctgttgccaaataattcagaagaatcaggaatttgccacaaatatacatatggtgtgcgggccatggttcagtgcattcctgtttggcttcgcttcatccagtgcctgtgccgatatcgagacacaaaaagggcctttcctcatttagttagtgctggcaaatactccacaactttcttcatggtgacgtttgcagccctttacagcactcacaaagaacgaggtcactcggacactatggtgttcttttacctgtggattgtcttttatatcatcagttcctgctataccctcatctgggatctcaagatggactggggtctcttcgataagaatgctggagagaacactttcctccgggaagagattgtatacccccaaaaagcctactactactgtgccataatagaggatgtgattctgcgctttgcttggactatccaaatctcgattacctctacaactttgttgcctcattctggggacatcattgctactgtctttgccccacttgaggttttccggcgatttgtgtggaacttcttccgcctggagaatgaacatctgaataactgtggtgaattccgtgctgtgcgggacatctctgtggcccccctgaacgcagatgatcagactctcctagaacagatgatggaccaggatgatggggtacgaaaccgccagaagaatcggtcatggaagtacaaccagagcatatccctgcgccggcctcgcctcgcttctcaatccaaggctcgtgacactaaggtattgatagaagacacagatgatgaagctaacacttgaattttctgaagtctagcttaacatctttggttttcctactctacaatcctttcctcgaccaacgcaacctctagtacctttccagccgaaaacaggagaaaacacataacacattttccgagctcttccggatcggatcctatggactccaaacaagctcactgtgtttcttttcttttcttctggtttaattttaattttctattttcaaaacaaatatttacttcatttgccaatcagaggatgttttaagaaacaaaacatagtatcttatggattgtttacaatcacaaggacatagatacctatcaggatgaagaacaggcattgcaaggaccctctgatgggacggtactgagatatctcggcttccgctcagcccggttttgactggttgaaaccggacattggtttttaaattttttgtcagtttatgtggagaatttttttctttccttcatacccagcgcaaaggcactggccgcacttgcaggaaaagtgcaacttaaagcagtatcttcattcatgaagctactttttaatttgatgtaacttttcttattttgggaagggttgctgggtgggtgggaaatatgatgtatttgttacacacagttttctcattatttatgaaacttaaccatacagaatgatataactcctgtgcaatgaaggtgataacagtaaaagaaggcaggggaaacttacgttggatgacatttatgagggtcagtcccacatacctctttcaggagacaacttgcaccagtttgaccttttcttttctttgtttttattttaagccaaagtttcattgctaacttcttaagttgctgctgctttagagtcctgagcatatctctcgtaacaaggaatcccacacttcacaccaccggctgaatttcatggaagaggttctgataatttttttaactttttaaggaacagatgtggaatacactggcccatatttcaaccttaacagctgaagctatgccttattatgcatccacatgtatggtccctgtagcgtgacctttactagctctgaatcagaagacagagctatttcagaggctctgtgtgccctcactagatagtttttcttctgggttcaaccactttagccagaatttgatcaaattaaaagtctgtcatggggaaactatatttttgagcacatggaacaaattatacttcctcattcatattatgttgatacaaaagaccttggcagccatttctcccagcagttttaaaggatgaacattggatttcatgccatcccatagaaaacctgttttaaaattttagggatctttacttggtcatacatgaaaagtacactgcttagaaattatagactattatgatctgtccacagtgcccattgtcacttctttgtctcatttcttccctttgttccttagtcatccaaataagcctgaaaaccataagagatattactttattgaatatggttggcattaaatttagcatttcattatctaacaaaattaatataaattccaggacatggtaaaatgtgttttaataacccccagacccaaatgaaaatttcaaagtcaataccagcagattcatgaaagtaaatttagtcctataattttcagcttaattataaacaaaggaacaaataagtggaagggcagctattaccattcgcttagtcaaaacattcggttactgccctttaatacactcctatcatcagcacttccaccatgtattacaagtcttgacccatccctgtcgtaactccagtaaaagttactgttactagaaaatttttatcaattaactgacaaatagtttctttttaaagtagtttcttccatctttattctgactagcttccaaaatgtgttccctttttgaatcgaggtttttttgttttgttttgttttctgaaaaaatcatacaactttgtgcttctattgcttttttgtgttttgttaagcatgtcccttggcccaaatggaagaggaaatgtttaattaatgctttttagtttaaataaattgaatcatttataataatcagtgttaacaatttagtgacccttggtaggttaaaggttgcattatttatacttgagatttttttcccctaactattctgttttttgtactttaaaactatgggggaaatatcactggtctgtcaagaaacagcagtaattattactgagttaaattgaaaagtccagtggaccaggcatttcttatataaataaaattggtggtactaatgtgtatccagagacatttgaattattaactttattctttattagtgaatctctatgatggcacacataaaatcttacagttgacttctgctgtttgaattcccca

SEQ ID NO: 430 - DNA, 715 bp, Homo sapiens
  misc_feature: Incyte ID No: 444648.9
ccggaaccccaaggggcgggtgtagcaggcaatcttggcgaaactgggaagggcgggcaggagggcagggaagccgctcacccaggcacaaagcgcctcccgcttgagcggactccaaagggacggtccgcggtgtgcagcgagctgcgctcaggggaccttgcgcccggcccttctgctgcacacagcccacccaggacctcccgcagcgctgacaggcggggcgggtgcaaagacggggcggggtctctgcgcccggccccctcccctgactatcaaagcagcggccggctgttggggtccaccacgccttccacctgccccactgcttcttcgcttctctcttggaaagtccagtctctcctcggcttgcaatggaccccaactgctcctgcgccgctggtgtctcctgcacctgcgctggttcctgcaagtgcaaagagtgcaaatgcacctcctgcaagaagagctgctgctcctgctgccccgtgggctgtagcaagtgtgcccagggctgtgtttgcaaaggggcgtcagagaagtgcagctgctgcgactgatgccaggacaacctttctcccagatgtaaacagagagacatgtacaaacctggattttttttttataccaccttgacccatttgctacattccttttcctgtgaaatatgtgagtgataattaaacactttagacctgaaaaaaaaaaaaaaagg

SEQ ID NO: 431 - DNA, 5652 bp, Homo sapiens
  misc_feature: Incyte ID No: 464689.22
ggtgtggtgtcggtgtcggcagcatccccggcgccctgctgcggtcgccgcgagcctcggcctctgtctcctccccctcccgcccttacctccacgcgggaccgcccgcgccagtcaactcctcgcactttgcccctgcttggcagcggataaaagggggctgaggaaataccggacacggtcacccgttgccagctctagcctttaaattcccggctcggggacctccacgcaccgcggctagcgccgacaaccagctagcgtgcaaggcgccgcggctcagcgcgtaccggcgggcttcgaaaccgcagtcctccggcgaccccgaactccgctccggagcctcagccccctggaaagtgatcccggcatcggagagccaagatgccggcccacttgctgcaggacgatatctctagctcctataccaccaccaccaccattacagcgcctccctccaggggtcctgcagaatggaggagataagttggagacgatgcccctctacttggaagacgacattcgccctgatataaaagatgatatatatgaccccacctacaaggataaggaaggcccaagccccaaggttgaatatgtctggagaaacatcatccttatgtctctgctacacttgggagccctgtatgggatcactttgattcctacctgcaagttctacacctggctttggggggtattctactattttgtcagtgccctgggcataacagcaggagctcatcgtctgtggagccaccgctcttacaaagctcggctgcccctacggctctttctgatcattgccaacacaatggcattccagaatgatgtctatgaatgggctcgtgaccaccgtgcccaccacaagttttcagaaacacatgctgatcctcataattcccgacgtggctttttcttctctcacgtgggttggctgcttgtgcgcaaacacccagctgtcaaagagaaggggagtacgctagacttgtctgacctagaagctgagaaactggtgatgttccagaggaggtactacaaacctggcttgctgatgatgtgcttcatcctgcccacgcttgtgccctggtatttctggggtgaaacttttcaaaacagtgtgttcgttgccactttcttgcgatatgctgtggtgcttaatgccacctggctggtgaacagtgctgcccacctcttcggatatcgtccttatgacaagaacattagcccccgggagaatatcctggtttcacttggagctgtgggtgagggcttccacaactaccaccactcctttccctatgactactctgccagtgagtaccgctggcacatcaacttcaccacattcttcattgattgcatggccgccctcggtctggcctatgaccggaagaaagtctccaaggccgccatcttggccaggattaaaagaaccggagatggaaactacaagagtggctgagtttggggtccctcaggttcctttttcaaaaaccagccaggcagaggttttaatgtctgtttattaactactgaataatgctaccaggatgctaaagatgatgatgttaacccattccagtacagtattcttttaaaattcaaaagtattgaaagccaacaactctgcctttatgatgctaagctgatattatttcttctcttatcctctctctcttctaggcccattgtcctccttttcactttattgctatcgccctcctttcccttattgcctcccaggcaagcagctggtcagtctttgctcagtgtccagcttccaaagcctagacaacctttctgtagcctaaaacgaatggtctttgctccagataactctctttccttgagctgttgtgagctttgaagtaggtggcttgagctagagataaaacagaatcttctgggtagtcccctgttgattatcttcagcccaggcttttgctagatggaatggaaaagcaacttcatttgacacaaagcttctaaagcaggtaaattgtcgggggagagagttagcatgtatgaatgtaaggatgagggaagcgaagcaagaggaacctctcgccatgatcagacatacagctgcctacctaatgaggacttcaagccccaccacatagcatgcttcctttctctcctggctcggggtaaaaagtggctgcggtgtttggcaatgctaattcaatgccgcaacatatagttgaggccgaggataaagaaaagacattttaagtttgtagtaaaagtggtctctgctggggaagggttttcttttctttttttctttaataacaaggagatttcttagttcatatatcaagaagtcttgaagttgggtgtttccagaattggtaaaaacagcagctcatagaattttgagtattccatgagctgctcattacagttctttcctctttctgctctgccatcttcaggatattggttcttcccctcatagtaataagatggctgtggcatttccaaacatccaaaaaaagggaaggatttaaggaggtgaagtcgggtcaaaaataaaatatatatacatatatacattgcttagaacgttaaactattagagtatttcccttccaaagagggatgtttgaaaaaaactctgaaggagaggaggaattagttgggatgccaatttcctctccactgctggacatgagatggagaggctgagggacaggatctataggcagcttctaagagcgaacttcacataggaagggatctgagaacacgttgccaggggcttgagaaggttactgagtgagttattgggagtcttaataaaataaactagatattaggtccattcattaattagttccagtttctccttgaaatgagtaaaaactagaaggcttctctccacagtgttgtgccccttcactcatttttttttgaggagaagggggtctctgttaacatctagcctaaagtatacaactgcctggggggcagggttaggaatctcttcactaccctgattcttgattcctggctctaccctgtctgtcccttttctttgaccagatctttctcttccctgaacgttttcttctttccctggacaggcagcctcctttgtgtgtattcagaggcagtgatgacttgctgtccaggcagctccctcctgcacacagaatgctcagggtcactgaaccactgcttctcttttgaaagtagagctagctgccactttcacgtggcctccgcagtgtctccacctacacccctgtgctcccctgccacactgatggctcaagacaaggctggcaaaccctcccagaaacatctctggcccagaaagcctctctctccctccctctctcatgaggcacagccaagccaagcgctcatgttgagccagtgggccagccacagagcaaaagagggtttattttcagtcccctctctctgggtcagaaccagagggcatgctgaatgccccctgcttacttggtgagggtgccccgcctgagtcagtgctctcagctggcagtgcaatgcttgtagaagtaggaggaaacagttctcactgggaagaagcaagggcaagaacccaagtgcctcacctcgaaaggaggccctgttccctggagtcagggtgaactgcaaagctttggctgagacctgggatttgagataccacaaaccctgctgaacacagtgtctgttcagcaaactaaccagcattccctacagcctagggcagacaatagtatagaagtctggaaaaaaacaaaaacagaatttgagaaccttggaccactccttgtccctgtagctcagtcatcaaagcagaagtcctggctttgctctataaagaattggaaatggtacactacccaaacactcagttcacttgttgagccccagtgcctggaagggaggaaggcctttcttctgtgttaattggcgtagaggctacaggggtaagccgggactaaaggcatccttgtctttggagctattcacctcagtaaaaaaggatctaagggaagatcacgtgtagttagttctgtagacctggtgcacctacccctttggaaatgtctgcgggatatttctaattccacaggtcatcagatgccgtgcttgataatatataaacaataaaaacaactttcacttcttcctatggtaatcgtgtgccatgggatctgatctgtaccatgaccctacataaggctggatggcacctcaggctgagggccccaatgtatgtgtggctgtgggtgtgggtgggagtgtgtctgctgagtaaggaacacgattttcaagattctaaagctcaattcaagtgacacattaatgataaactcagatctgatcaagagtccggatttctaacagtccttgctttgggggggtgtgctgacaacttagctcaggtgccttacatcttttctaatcacagtgttgcatatgagcctgccctcactccctctgcagaatccctttgcacctgagaccctactgaagtggctggtagaaaaaaggggcctgagtggaggattatcagtatcacgatttgcaggattcccttctgggcttcattctggaaacttttgttagggctgcttttcttaagtgcccacatttgatggagggtggaaataatttgaatgtatttgatttataagtttttttttttttttgggttaaaagatggttgtagcatttaaaatggaaaattttctccttggtttgctagtatcttgggtgtattctctgtaagtgtagctcaaataggtcatcatgaaaggttaaaaaagcgaggtggccatgttatgctggtggttaaggccagggcctctccaaccactgtgccactgacttgctgtgtgaccctgggcaagtcacttaactataaggtgcctcagttttccttctgttaaaatggggataataatactgacctacctcaaagggcagttttgaggcatgactaatgctttttagaaagcattttgggatccttcagcacaggaattctcaagacctgagtattttttataataggaatgtccaccatgaacttgatacgtccgtgtgtcccagatgctgtcattagtctatatggttctccaagaaactgaatgaatccattggagaagcggtggataactagccagacaaaatttgagaatacataaacaacgcattgccacggaaacatacagaggatgccttttctgtgattgggtgggattttttccctttttatgtgggatatagtagttacttgtgacaagaataattttggaataatttctattaatatcaactctgaagctaattgtactaatctgagattgtggtgagcagtgacgatgaggagttgtccagggacagagacgtatatgtgactacccatactcccagaaacgccagggatgagggcgctacaggcctcaggccctcaggtactgtcagttgtcccatctgcatggactggatactcagaggtaagtaaaccaagctgtatcttccaggcttctggtttctaaacttcactgaaagaattggatgagacaggatcttccccctcggtgggattggacacccctactcacagtcatgcctgggccctcacttattgcagatctgcctgtgaggggagaatgtgcc

SEQ ID NO: 432 - DNA, 2797 bp, Homo sapiens
  misc_feature: Incyte ID No: 464689.15
gcctcccaccccctgtattcccacccctggactggtggcccctgccttggggaaggtctccccatgtgcctgcaccaggagatttaaacattctgcctgcccttttcgatgtcctaattgtggccagcgttttgaaactgaaaatctagtggttgaacatatgtctagctgctcagagagtagttgttttcattattaatccaaagccatgatcagacatacagctgcctacctaatgaggacttcaagccccaccacatagcatgcttcctttctctcctggctcggggtaaaaagtggctgcggtgtttggcaatgctaattcaatgccgcaacatatagttgaggccgaggataaagaaaagacattttaagtttgtagtaaaagtggtctctgctggggaagggttttcttttctttttttctttaataacaaggagatttcttagttcatatatcaagaagtcttgaagttgggtgtttccagaattggtaaaaacagcagctcatagaattttgagtattccatgagctgctcattacagttctttcctctttctgctctgccatcttcaggatattggttcttcccctcatagtaataagatggctgtggcatttccaaacatccaaaaaaagggaaggatttaaggaggtgaagtcgggtcaaaaataaaatatatatacatatatacattgcttagaacgttaaactattagagtatttcccttccaaagagggatgtttggaaaaaactctgaaggagaggaggaattagttgggatgccaatttcctctccactgctggacatgagatggagaggctgagggacaggatctataggcagcttctaagagcgaacttcacataggaagggatctgagaacacgttgccaggggcttgagaaggttactgagtgagttattgggagtcttaataaaataaactagatattaggtccattcattaattagttccagtttctccttgaaatgagtaaaaactagaaggcttctctccacagtgttgtgccccttcactcatttttttttgaggagaagggggtctctgttaacatctagcctaaagtatagaactgcctggggggcagggttaggaatctcttcactaccctgattcttgattcctggctctaccctgtctgtcccttttctttgaccagatctttctcttccctgaacgttttcttctttccctggacaggcagcctcctttgtgtgtattcagaggcagtgatgacttgctgtccaggcagctccctcctgcacacagaatgctcagggtcactgaaccactgcttctcttttgaaagtagagctagctgccactttcacgtggcctccgcagtgtctccacctacacccctgtgctcccctgccacactgatggctcaagacaaggctggcaaaccctcccagaaacatctctggcccagaaagcctctctctccctccctctctcatgaggcacagccaagccaagcgctcatgttgagccagtgggccagccacagagcaaaagagggtttattttcagtcccctctctctgggtcagaaccagagggcatgctgaatgccccctgcttacttggtgagggtgccccgcctgagtcagtgctctcagctggcagtgcaatgcttgtagaagtaggaggaaacagttctcactgggaagaagcaagggcaagaacccaagtgcctcacctcgaaaggaggccctgttccctggagtcagggtgaactgcaaagctttggctgagacctgggatttgagataccacaaaccctgctgaacacagtgtctgttcagcaaactaaccagcattccctacagcctagggcagacaatagtatagaagtctggaaaaaaacaaaaacagaatttgagaaccttggaccactcctgtccctgtagctcagtcatcaaagcagaagtctggctttgctctattaagattggaaatgtacactaccaaacactcagtccactgttgagccccagtgctggaagggaggaaggcctttcttctgtgttaattgcgtagaggctacaggggttagcctggactaaaggcatccttgtcttttgagctattcacctcagtagaaaaggatctaagggaagatcactgtagtttagttctgttgacctgtgcacctaccccttggaaatgtctgctggtatttctaattccacaggtcatcagatgcctgcttgataatatataaacaataaaaacaactttcacttcttcctattgtaatcgtgtgccatggatctgatctgtaccatgaccctacataaggctggatggcacctcaggctgagggccccaatgtatgtgtggctgtgggtgtgggtgggagtgtgtctgctgagtaaggaacacgattttcaagattctaaagctcaattcaagtgacacattaatgataaactcagatctgatcaagagtccggatttctaacagtccttgctttggggggtgtgctgacaacttagctcaggtgccttacatcttttctaatcacagtgttgcatatgagcctgccctcactccctctgcagaatccctttgcacctgagaccctactgaagtggctggtagaaaaaggggcctgagtggaggattatcagtatcacgatttgcaggattcccttctgggcttcattctggaaacttttgttagggctgcttttcttaagtgcccacatttgatggagggtggaaataatttgaatgtatttgatttataagtttttttttttt

SEQ ID NO: 433 - DNA, 3509 bp, Homo sapiens
  misc_feature: Incyte ID No: 334809.3c
cagaaattatcacattttatttttgaaaagttgctgcttaaaaaaaaatctaactataaccacatttaaactgaaaaacaaattacaactgctgcttctgtttagcagcagcacataacaacacattcttcttccccactgtgctcatggggtatgctataacctcagtaaaattcctcctagggtacacattaaaaagaagagaactggtggaaattcattccacaatctgaacaaagtaaaagtaaatttggtgtatgttaatgagtacaccatatcaacttagaaaaattgtgttaatgagaaaaggggagattcaactccttgagtagctctatatacttaaaatataaagccaccattgtatctaaaattgagtctgaaatatggataacaaaattgaccacagctattttccatcacatattgcagcttttaaaaagtacacaattgttaagtttgcattagaaatataagcagattacctactagttgaaaccatatagtattgttactaagctgatttttttaaaaaagtacaaagaaacatacattttcattcatttggaaaatgtaaaaatttaagtactaatatataatctcttcactttctctgatctacaaatggatagaatgcctagttatcgtcatgcagataaattcttcagaattcaattaccaaagcaagcaacaaacaaaaaaaaccttgtcagtaatacacagatgaatctctttaacagtttctattctttagcagtctttgatgatttcagaatttgcagctttagctcttttatcatcatctctaacttctgtcttgcttcccgttcctgtctgagttcatcttggagttcttgcctatcggcctcagcatggtccaatctctgcctcagttctgccaactgtcctgcatattcagcctctttgtctttttctaaatttgagtcacaggtacatttttgcttcattatctgctccaattttttctctaagtctttctgttcaacataaaattcttccattctttgagcatgttcattctgcaaagattcaagctctttctgtaaattctgctgttcttcagtgagttccttcatagattttgaactactcaacatttttacttccatctgaagttgttgcttcttttgcaaaatcaagtttagtttttcctgttgttttaaataagttctcattacttcttccatgatttttcccttatcatcctcacaaatgacatctttcacaagaagcggagatgaagcggcagcaacaaggccaattcccactttgtttatgtctctgactaagttgcaagtggcagactcagatttccttttacttgtagaattatttgagattgatgcatctaaacggctacataattctctacttgtttttaaatccattttctcctgttcctcaagtgagacatctggataagacactgttttttgaagtttaccactactgtgagccttctctgactgtcttgatatggacttacttgcctctgtctttgtgagctctttagactgggatacagcagaagtaagtgacacatttggggcaaccactttatcacacatgtataagtagtagctggggtgtaaaaatgaatgtgtctgagaaacatggtcaccttcctgctttataacaggataccatgactgtaattccattcctgatggtgcatctgtcttggattgatttctctttccacttctcatgctaaacttctccttcatttcttctaaaattatcttcagtttcttttcttcaggtgttcctaagtatttttggttcacatgaagatagcaatgccatttagctgattcaaagccccagtggcaagttcttttgtcaggtgatctgtgagaatgcatcacaaacgtctggggtgcaaacattccacaacactccagacattgaatacacggagcatcaggctgaacataaaactggggtgcaaataaaccctgacatttgcctaggcattcatgctccacttcaaaggcactgccagtttcctttaactgggccaatgagcttttagcaggaagtacgctaccattttgaggaaaagttcgtggccgcaataaagcattacataatctttgtgcatcagttaatgtaatcagcccacaggatggggcattgaatggaagtatgcccagtacctttaagatatgaagctggtctgaagtacaccttgaacaatatatgtacagttcatcacacactgtatttatttgctggagtgtaaattctcggagaacagaatttaagacttggggcaaacagagtctcttttctcctccaacttgaaaacaagaaatagattccccttccaacacagtctgagtgagttctgtggagctatctgaagggatgagcaatgggccaggaagaacctgaggtgatggaagaggcagaaatacagtaggcgacatgctttcttgggaatgccgagcagaaaatgctgctggtccacccagcgagctctgactacttaaatggaattgtgccaatgtgtgtttcaaactgggatttaaatgcaaagtttcaggaacagaagtacaggttcgcttaacatgctctccatcagtttccactggtgcttctccatagtcatccaagtgttccttcttaactgttggcaccttgtttatcgtttttccatttacatgaatgtccgttatcatttttttcgctggggggctgccatcatctcccatcccattcagttttttagttgagccctgaaccaaggagaaatttgtctggaggttttccatggtacactcttctgttaaataattaagtctgagattagcatttctatttagttgcttatttgaaaagaggaaagtaatgaatggatacaaatgcctatcgtaacttactctcaaactttcaaagcgagagccccttaaattaataaattttgcgacttagttttggttctccttataatctggtataatttcactacaaatcctataaaattgttcgttttgcctctaataataaagaaaagaggcacacctctgaggatgcctttgttttcttgaattcttcagatatacatattaaaataaagttaccaatttctcaattaaagatgtccagggtcaatgcaatggtctggtttgttttaaccaaaacacatgaaaagtttatgccattccttgtgccataaaacctagactcaaacacaagtcaaaatgatgcaaccaaatttaatctttaccaccaaggaaaccaaaaaggagggcagagggagtatttcctctaaaaatgatggtctgctggtctgtgctgaaaaactgaagacgtgtgtaaatcctcacaccagtaagaacagcctccgacttaaaaaattgcccagttatcttcaaggattatagttcattcttcttttaattaatctggaagaagagaaggggggttggggaagagttacatttgaatttgctccagaggccaaagggccaatttgaaaccag

SEQ ID NO: 434 - DNA, 757 bp, Homo sapiens
  misc_feature: Incyte ID No: 351241.1
atgactcaaaccccttaaagaacacagaacaaaggcaccactcaccccatttgggggtgttctgttttctttgtggagtttcaagagtcatgggcagattcttcttaggtctaaagttctgctttcctgtattacattacctcacctctttggcttttgtgagtagcagagattaccttgtactgtgagaggattttaccttgatgtgtgtactggcggatgagagctacaaagttaaagctgactgaggacagtttacaggaagcagtcttcactgttttgttttttccacctaggaagttgtttaggatcctaattctaattcagaggtgcattctacagagtcttctccattgcctttcctctcaaaattaatcttgattggcttctctgggcatttgcgtgaggaactgaaactcattttcatagataaatgagagaatgagtttcctcagctccctaaagggcattttgcttctcccagctgaaaggctcccctggattactaggggctaagtgggagtgtctagtgggttgacccccagcaacgtgcagcagccctacagggaatccccaacaaaattagttttaaaaggcttgtccaagaaatgaatataggagctggtcattccatgctttgagccctcctggaggtgctagacctctggagacaaaaatgactcagtggataacacgctatggagtcctgccaataacccagcacacttcaacccatcccactaaaccctaggccttt

SEQ ID NO: 435 - DNA, 500 bp, Homo sapiens
  misc_feature: Incyte ID No: 482336.11
  unsure 71, 99, 110: a, t, c, g, or other
gaaggaacgcagccagggaaactagctgggccaggaggggtcagacccctgaacaagtgagctgatctctnaaggaggagctggatcggtgtgaggganagcggtgcggnttctggagcagcataacaagctgctggagaccaagtggacgctgctgcaggagcagaagtcggccaagagcagccgcctcccagacatctttgaggcccagattgctggccttcggggtcagcttgaggcactgcaggtggatgggggccgcctggaggcggagctgcggagcatgcaggatgtggtggaggacttcaagaataagtaatgccccctgtgccacatgcgaagacccctgccccgggccaatgtgaccctcatgagctgaccctgtgcaagtccccctgcttcaggaatcagcatgcagctgctcagtccaataactccctgaggggccagtcttgaccaacacatttcctgcctttcctctctcctctttgtccctgggg

SEQ ID NO: 436 - DNA, 1535 bp, Homo sapiens
  misc_feature: Incyte ID No: 482336.31
  unsure 78, 1531: a, t, c, g, or other
ttagatccgggtactctgagaggatatggttcccccaaccctggggggatatggaggtagataccttgcttttatctnttaacttatcagagttgtggtccagaaactcattcaaactgggaggcctactttaagaatacaaagttaccaaaaaaaccccacttacttagaatgagaaaagtcacacagatcactagagccttggacattcaggcctcttccgtctgagttccttaggcatcgtaccagaaattcttcgagttgctgcctgactgcaacctggctccctctccccacccacaagtgccagcaactcccagcaccagcaggggccatttaagcaagccccctggaagctttcagcaaacctctctctttccctcagcctttgctctgcctgcttcctgggcttggggccgcagaggccagcgaggctcccttcattccctccaccaaagtgaggtcttccctgcccccacagagcaaactgatccccaaggccaaggccttggtgacaatgggactgtgagtcacaaaacaaacatagccagctgtcccgaatggatttttaatttctactgcaagacctgtttcagccccactggctgcttaaagccacccccactccctgctccttccttagtcctggctggagccccattcaatcagtcaacgattcacgaattattttgacatatattaagcaatgacttctccaggcctcatactggggataaaagtatcaataggccacagacacctttaggattttatgatacggtgaggaaaggcagccatctacataaataacacatacagctaccatcaccgaatcccaggtgctcagggctttagacagattatgtcatttaaacctcacaggcccatgaatttggtcctgtagttgggcccaagacataggtgggaaatggaggccctgagacattgcctggggtcaggtggccagtggatagaagggccaaggtgaacactcccttcctgcatgcctcctcgctccttttacaaggctgaaggcaggctggaagtgtggggcaagaaggaaaaatcaatgatcctgcttggggcctggaaggagagagggctgagagcgcttccctcccacgctaggaaagagccgtcctcactgtctgtcctctgcccccaggttggctggagatggagtgggagccgtgaatatctctgtgatgaattccactggtggcagtagcagtggcggtggcattgggctgaccctcgggggaaccatgggcagcaatgccctgagcttctccagcagtgcgggtcctgggctcctgaaggcttattccatccggaccgcatccgccagtcgcaggagtgcccgcgactgagccgcctcccaccactccactcctccagccaccacccacaatcacaagaagattcccacccctgcctcccatgcctggtcccaagacagtgagacagtctggaaagtgatgtcagaatagttccaataaagcagcctcattctgaggcctgagtgatccanaaaa

SEQ ID NO: 437 - DNA, 1183 bp, Homo sapiens
  misc_feature: Incyte ID No: 197538.2
ctgagtcgacaccatcctgagcctctgtcctcctatgtggcacagtcttccagcagccctgggccaggggtgggatatgatgacaggtcttttggagaacgtggtggacagttagcaatgtcactcccccacacagtatgtggcaaggaagaagaatctagaaggtgtgctccaggaaggcagagatgtttaagattgttcaccctcattcccccagggcctggcacaggtgtttcacaattatcttcggcctgggggcggaggggaggggcccaccacggccttatttccgcgagcgccggcactgcccgctccgagcccgtgtctgtcgggtgccgagccaactttcctgcgtccatgcagccccgccggcaacggctgcctgctccctggtccgggcccaggggcccgcgccccaccgccccgctgctcgcgctgctgctgttgctcgccccggtggcggcgcccgcggggtccggggaccccgacgaccctgggcagcctcaggatgctggggtcccgcgcaggctcctgcagcaggcggcgcgcgcggcgcttcacttcttcaacttccggtccggctcgcccagcgcgctacgagtgctggccgaggtgcaggagggccgcgcgtggattaatccaaaagagggatgtaaagttcacgtggtcttcagcacagagcgctacaacccagagtctttacttcaggaaggtgagggacgtttggggaaatgttctgctcgagtgtttttcaagaatcagaaacccagaccaaccatcaatgtaacttgtacacggctcatcgagaaaaagaaaagacaacaagaggattacctgctttacaagcaaatgaagcaactgaaaaaccccttggaaatagtcagcatacctgataatcatggacatattgatccctctctgagactcatctgggatttggctttccttggaagctcttacgtgatgtgggaaatgacaacacaggtgtcacactactacttggcacagctcactagtgtgaggcagtgggtaagaaaaacctgaaaattaacttgtgccacaagagttacaatcaaagtggtctccttagactgaattcatgtgaacttctaatttcatatcaagagttgtaatcacatttatttcaataaatatgtgagttcctgcaaaaaaaaaaaaaagg

SEQ ID NO: 438 - DNA, 1285 bp, Homo sapiens
  misc_feature: Incyte ID No: 197538.8
gcttgaggtatatatacagtatctagatccttaaggttgttaaaagaatctccctattcccacagacttcggtctccatcagaaaaagtgacagacattcaaccagactttcatataactcagtgacaagacaaaaatgaggatccatgacttccatatcttgaagcaaaataccaccaaaaaccgtgaggctgaaatcgaaaaggcagtaggagacacaaggcacccattcaaaacaagaatgtattgtatagttattacactaaataccaccatatttattacactaactcttttttctccctctagaaaactaatgatgatacaattgattttgattatactgttctacttcatgaattatcaacacaggaaataattccctgtcgcattcacttggtctggtaccctggcaaacctcttaaagtgaagtaccactgtcaagagctacagacaccagaagaagcctccggaactgaagaaggatcagctgtagtaccaacagagcttagtaatttctaaaaagaaaaaatgatctttttccgacttctaaacaagtgactatactagcataaatcattcttctagtaaaacagctaaggtatagacattctaataatttgggaaaacctatgattacaagtaaaaactcagaaatgcaaagatgttggttttttgtttctcagtctgctttagcttttaactctggaagcgcatgcacactgaactctgctcagtgctaaacagtcaccagcaggttcctcagggtttcagccctaaaatgtaaaacctggataatcagtgtatgttgcaccagaatcagcattttttttttaactgcaaaaaatgatggtctcatctctgaatttatatttctcattcttttgaacatactatagctaatatattttatgttgctaaattgcttctatctagcatgttaaacaaagataatatactttcgatgaaagtaaattataggaaaaaaattaactgttttaaaaagaacttgattatgttttatgatttcaggcaagtattcatttttaacttgctacctacttttaaataaatgtttacatttctaaataatgaaatgtgttgaatgttctcgtgaagatttgtataccaaggaaaaatttgtgctaaactggaattaaatgatatggtaatattgcttaacttaaattttacataataatagacgtctgtctcaccagataaagctgtctgcaacatgcatctaaagaactctgatgtatactgaaagtatattaaatattac

SEQ ID NO: 439 - DNA, 632 bp, Homo sapiens
  misc_feature: Incyte ID No: 232048.14
ggaagacaccagcggtgactacaagaacgccctgctgagcctggtgggcagcgacccctgaggcacagaagaacaagagcaaagaccatgaagccagagtctccaggactcctcactcaacctcggccatggacgcagccagacagatgcctcagcatgaagggcttggggacttgtggatcattccttcctccctgcaggagcttcccaagctggtcacagagtctcctgggcacagccggagagctggctgggagcccttttgttttagaacacacatccttcagcagctgagaaacgaacacgaatccatcccaaccgagatgccattaacattcatctaaaaatgttaggctctaaatggacgaaaaattctctcgccatcttaataacaaaataaactacaaattcctgacccaaggacactgtgttataagaggcgtgggctcccctggtggctgaccaggtcagctgccctggccttacacccctctgcatgcagcacagaagggtgtgaccatgccctcagcaccactcttgtccccactgaacggcaactgagactgggtacctggagattctgaagtgcctttgctgtggttttcaaaataataaagatttgtattcaactc

SEQ ID NO: 440 - DNA, 6314 bp, Homo sapiens
  misc_feature: Incyte ID No: 1092381.1
ggccctaccagtcactgtgcccaccggagcgtcagaggagcagctagagaagaaagctgtccagggtgctgagctgtcagaagcaggcaatggaaagagagctgttcatgaggaaatcagacctgtagatttcaagcagagaaataaggcagataaaggtgtatcattatcgaaggatccttcatgccagacccaaatttcagattcacctgcagatgctagcccacctacaggacttccagatgctgaagattcagaagtgtcatctcagaagcccatagaggaaaaagcagttactccaagccctgagcaagtgtttgctgagtgttcccagaagaggattttgggattactagcagccatgttacctcccttaaagtcgggccccacggttcccctgatagacctggagcacgtccttccactcatgtttcaggttgtcatctcaaacgcaggccacctgaatgaaacctaccatctcaccctgggtcttctcggccagttaattatccgtcttttgccagcagaggtagacgccgcagtgatcaaagtcctctcagccaaacacaacctgtttgctgcaggggacagttccattgtgccagatggctggaaaaccacccacctgctctttagcctgggagctgtgtgtctggacagccgggtgggcttggactgggcgtgctccatggcagagatcctgcggtcactcaacagtgccccactgtggcgtgatgtcattgccaccttcacagaccactgcatcaagcagctgccattccagctgaagcacaccaacatcttcaccctgctcgtgctggttggcttcccccaggtcctctgtgtgggaacccgctgcgtttatatggataatgccaatgaaccccataatgtgatcatcttgaagcactttactgagaagaacagggctgtgattgttgatgtcaaaactcggaagaggaaaacagtgaaggactaccagctggtccagaagggaggaggacaagagtgtggtgactctcgggcccagctgagccagtactcccagcactttgcctttatcgccagtcaccttctgcaaagcagcatggacagccattgtcccgaggcagtagaagcaacttgggtcctgtccctggccctgaaaggattgtataaaacactaaaggctcacggttttgaggagatccgtgctactttccttcagaccgatttgctgaagttgctggtgaaaaagtgtagcaaagggactggctttagtaaaacgtggctcctccgggacctggaaattttgtccatcatgctgtactcctcaaaaaaggagatcaacgctttggctgagcacggagacctagagctggatgagcgaggggaccgagaggaagaggtggaacggccagtcagcagccctggcgacccagagcagaaaaagctggacccccttgagggcctggatgagcccaccagaatatgtttcttgatggctcatgatgccctcaatgcccctctgcacattctccgggccatatacgaactgcagatgaaaaagaccgattatttcttcctggaggttcagaagaggtttgatggtgatgagctcaccacagatgaaaggatacggtccctggctcagcggtggcagcccagtaagagtctgaggctggaagaacagagcgccaaagctgtggatacagacatgattatcctgccatgcttgtcccggcctgcacgctgtgaccaagccactgctgaatcgaaccctgtgacccagaagctgatctccagcacagagagcgaactgcagcagagctatgccaagcagcgccgtagcaagagcgccgccctcctgcacaaggagctgaactgcaagagtaagagggctgtccgggactacctcttccgagtgaacgaggccacagctgtcctgtacgcccgccacgtgcttgcatccctgctcgccgagtggcctagccacgtgccagtgagcgaggacatcctggagctcagtggccctgcccatatgacctacattttggatatgttcatgcagctggaagaaaagcatgagtgggagaaggtagttatgcagactgagcttgtgctcacccaccaggttcttcctctgccccacaggcttcctccagtgagtgcttcctggagcgaggctacctgtgtggctgtgcagctccctgacaggtgtgaatgcagcaaaggtagggtcactgtatcctctcccaaggattgggctagtgaggaactcaggggccctgagcgcgatttccagctgaaccagaaagctttgtcgccatcttcccagtttccaagtgcagaaatcttgaggcacattcggtagctcctttttgatcctgtccctcacccaccttcacacacacacacgcagtccatgaggaagttcatttggcctctcagccttgctttgtccatctgagaacaccaccagacctcgaggtcttttcccggccttgcagccctgcaggtgctggcaggcttgctctagcatatctatctttcggaagggacagagggagccaccctgcctctactaggcccttgcataggcgtgtcctcccacagttcttgccacctagagctcccaaccctgcacctcactccaggcatcgattacattgtgtggtcattatttatccataggccaatccacctgcttggctggggactccttcaaggaccaggaccctttatgattggttcagttagttctttcagaccacctctaagtagcatcattctgaaaggactgcagtgtcctgactgacaccaagagcctggtcaagtgagaggtggctggtggagttggttttgggtggtggagtcacagaggctcgtcctaggtctaagatgatgccagcacctttgggtggagcttgggttgaagtaaactgtcccttcttcctgatgccacttgcaggccctgaccttatctgtctgcttcccaccagatcctgcagaaagtgctccagggctgccgagaggacatgctggggaccatggccctggctgcatgccagttcatggaggagccaggaatggaggtgcaagtgagggagtcgaaacacccgtataacaacaacaccaacttcgaggataaagttcacattcctggtgccatctacctctcaatcaaattcgactctcagtgcaacacagaggagggctgtgacgagttagccatgtccagcagcagtgacttccagcaagaccgacacagcttcagcgggtctcagcagaagtggaaagattttgaacttccaggagacactctgtattaccgcttcacctccgacatgagcaacaccgagtggggctacagattcaccgtgacggccggacacctggggcggttccagacaggattcgagattttgaagcagatgttgtcagaagaaagggtcgtgcctcatctcccattggcaaaaatttgggaatggctggtgggcgtggcctgtcgccagactggccatcaacgattaaaagccatccacttacttctgaggattgtgcgatgctgcggccacagtgacctgtgtgaccttgcgctgttgaagcccctgtggcagctctttacccacatggagtacggcctgtttgaggacgtgacgcagcccggcatcctccttcccctgcatcgtgccctcactgagctcttcttcgtcaccgagaaccgtgcccaggagcttggcgtgctgcaggattacctgctggccctaaccacggacgaccaccttctccgctgtgcggcacaggctctgcagaacattgctgccatcagcctggccatcaactacccaaacaaggccacccgcctctggaatgtggagtgttagcccttggtggggcgtgcatgggactagttcatctgccacagggattttagagcagacacctaacctcattcaggaaaactcctgtagcgccagtgcccagctctccttgagctgaccactccagttaggatgccaagcagccacgtctccaagagctcccgtgcgtaggctggacacaagcacaggctgtagcatggtgaaaataagccaagcagtgcagaatgcctcagaaagggtgggcagggggcccttaagaaggttcagagaccagccttctccagaggctgtcactgcaggagccgtgggcctgggaagacttggaagcggcctctctcaactggtttctgtctccgtggagctggaactgcctgcacttgccttcagagggaggcacagtccacccagatccacctttccagcaagacccccagtggctgcccagcctgggagcacctctttgcttttcacaccaaaccaaaactggcgagagcccctcctagccaccagtgatccccaagcatccagtacagaaccaggcatcgagctagctccctgcacggccgcaccctcccagagaactccttgaggagaacaagtgcccttggggacagccggcaggcgcccctgtacgtctgctcatgcaccaggcagcacagccgcagttcctcagttgttgttttgacatatttcagtttccacctcacgtttttagagcagaaccacactgtctccctggaggggctcgagggcatgaccggggactgaccattctgtgaaaggagcagaatgtgaggagcacgcgtgagcttatgtaccgtgaagatgatcagaggatatcttattttaagagtaaaaacccacataattttatttctgcttgatagtcatggtagtctgtcatacccacctctgggactctgcgtggctgtttggctgtcacttgtagcaataacgacattagttctagtcagtgctgttttacatttttcttttgatgggtttagtcttgccctggagtgccgatgatgattctccctccagagccacgcttgggaacatgaagcaagtctggcgtgtgggctgcgtgccggccttagtgggacccgtggggttggagcatgcctttaggggcagtgtctgggccgaagcacgtcccaccacacagtgccagagccagagaaggggccccaccaccaaggccaagcttgaccaggtcagcattgccatggcccagtgtgccccgtggcctctgaagatccctctgtgcagggtctgcagggatctggattgcaagggcccaagtctgcaggtctggaagcatcttcctataagagcactttcgccttctgggtcaggactccaaggtgcagcgggcttcacagccctacaattgggttctcagctaagccccagagttctggtagaaccatcccggggcgggtggagggtgggatttaagggagacgggaacacatggggcaggtcctggaacttggtggcctgaggactgaggccattgccctggtggaaaggcctggcctggttcctgtggcttgggacctgaataggcaggtgctgctggctccgtagaaacccttttcccatcttttgctctttgccaaacctaccttgctttgggagctgcctgcaccaccccagagaaggccccaccttcttcatccctcagacccgaggaggcctcccagtaaggagtttcccaagaggggactcacaggaaacaagtcttagtgcttgggagggaggccccgctgcgtgctcagactcacagccaacctggaaggtagacgagatagcgccacccacgcccctccacaccccagactccgagtaaagcgggcggtagggccggagtcacctcccctatggcagtggccgccgctgtactccatcctcccgtcaggaagatcagctgtaaataaacgctgggctccccagagcacctgtccgcccactgcccttgctgttctgggatcttcgctgcagttcacgggaaacaagcctgagtccgctcgcacccgcggctgctctcccggctcggcccggccgcctctgtctccggccaccgggtggcgctgccgagccagagccgccgcgtcccggcgctttccaggagccccaggcccggaggaggcgaagcccgcagagcaaaggtggaaacacgtgcctacgctgtaaagaaatcctgttccagagcatacctgttgtacaaacagacactgttcctaacgagaggagtgacgtattttcatcaccgtttttaatttgttttcttacgggtttacgattttgaatttttcttatttggttgaaagaattttgattctatcagcctgagtgagttcagcctgtaaaaaggatgttaagctgtgggtaaaatatgcaaacgaaaagaaatatattgtacaaattctatataataaggtaaaa

SEQ ID NO: 441 - DNA, 614 bp, Homo sapiens
  misc_feature: Incyte ID No: 903804.1
tgttctctgtatcttaaatcaactctgtgccaaagcagttctgtcccctgactcccacccctacccaccaaaaagtggtagacatgaagggcaggtaagggaacagaaaatgtctccttgcagatatatatattttaaacgaactgtgtaataagtatgagctaaggagacagaaagacagtagatgagaaaagaagagtacctatacctacaaggggcaaaatgaatgcaatccttcatttgataagagagaactgaaagagaatattatttttctacaataaagcaagctgtcctctcaggataaagtggaatttcgacatggattatggacttcttccaactcccattgacattgcttcttaccacacatggggaagggctgcctttcctgaaaggggaagaaggcactgtcctttcagacaaagtttgtacaaattcctgaactgcagatttgctaatgtgaccgcgtatacttatattcataatttaagtgattgtttatggtcagatacatattgttaaacttgaaaatgttttattacattacatcaaataaagtctatttgtagctgaaaaaactaaaaataataaaaaggaggaaactgaggctt

SEQ ID NO: 442 - DNA, 831 bp, Homo sapiens
  misc_feature: Incyte ID No: 210945.6
actagcggctcgagcggctcgagcggctcgaggcgagccggagcgacggcggggctggggccggagccgagccggggtcgggcagcagcagggaccccccagaggcggggcctgtgggaccgctatgggcgtggagatcgagaccatctcccccggagacggaaggacattccccaagaagggccaaacgtgtgtggtgcactacacaggaatgctccaaaatgggaagaagtttgattcatccagagacagaaacaaacctttcaagttcagaattggcaaacaggaagtcatcaaaggttttgaagagggtgcagcccagctgggtcctctttctcctctccccatctgcccccatccctgctagatgagcttggggcagagggcgaagctgacctgcacccctgatgtggcatatggagccacgggccaccccggtgtcatccctcccaatgccaccctcatctttgacgtggagctgctcaacttagagtgaaggcaggaaggaactcaaggtggctggagatggctgctgctcaccctcctagcctgctctgccactgggacggctcctgcttttggggctcttgatcagtgtgctaacctcactgcctcatggcatcatccattctctctgcccaagttgctctgtatgtgttcgtcagtgttcatgcgaattcttgcttgaggaaacttcggttgcagattgaagcatttcaggttgtgcattttgtgtgatgcatgtagtagcctttcctgatgacagaacacagatctcttgttcgcacaatctacactggcttaccttcacttaaaccacacacacaaggt

SEQ ID NO: 443 - DNA, 1120 bp, Homo sapiens
  misc_feature: Incyte ID No: 210945.3c
gcgagccggagcgacggtggggctggggccggagccgagccggggtcgggcagcagcagggaccccccagaggcggggcctgtgggaccgctatgggcgtggagatcgagaccatctcccccggagacggaaggacattccccaagaagggccaaacgtgtgtggtgcactacacaggaatgctccaaaatgggaagaagtttgattcatccagagacagaaacaaacctttcaagttcagaattggcaaacaggaagtcatcaaaggttttgaagagggtgcagcccagatgagcttggggcagagggcgaagctgacctgcacccctgatgtggcatatggagccacgggccaccccggtgtcatccctcccaatgccaccctcatctttgacgtggagctgctcaacttagagtgaaggcaggaaggaactcaaggtggctggagatggctgctgctcaccctcctagcctgctctgccactgggacggctcctgcttttggggctcttgatcagtgtgctaacctcactgcctcatggcatcatccattctctctgcccaagttgctctgtatgtgttcgtcagtgttcatgcgaattcttgcttgaggaaacttcggttgcagattgaagcatttcaggttgtgcattttgtgtgatgcatgtagtagcctttcctgatgacagaacacagatctcttgttcgcacaatctacactgccttaccttcacttaaaccacacacacaaggtgctcagacatgaaatgtacatggcgtaccgtacacagagggacttgagccagttacctttgctgtcactttctctcttataaattctgttagctgctcacttaaacaatgtcctctttgagaaaatgtaaaataaaggctctgtgcttgacaaaaaaaaaaaaaaggggggccccccaactatttggggtttcccgaccccaaacttcgaaaccagggcaaaagctgttccccgggtgaaaatttgttaaccgggcacaaaatttccccaaaaaactattggggcccggggaaaccctaaaaggtgttaaaacccctgggggggccccacaaagggggtgagagcaaaccccccaaccttttttgg

SEQ ID NO: 444 - DNA, 2643 bp, Homo sapiens
  misc_feature: Incyte ID No: 403448.2
  unsure 449, 456, 513, 2638: a, t, c, g, or other
gttctaaatcctgtttccttgggccattaaaaatccatgctgtccctaatcaatatatagttatgtgtgaccttcttagaattaaaaaaatgccgctggacagcctttgaagggaaaggcagagaaatctgttttgatggcttgaaaataagtgaaaaggtttttagggaaagctaacaagctttcaaagatttcagatctgccagcattcattcattaaggcatgggattaggccaaaagagcctcctaccaagggagagacaggaaccatgtaaggagatctgtgagaccgcagtggaagagtattgaaatagaagccagacctgtagacgtatttgttaatatgtgtgccaagccaaagtacaggaggaggcttggaggcatggagttgtggtggaagcaggttctgaaaagcagaactctgaagctggctcattctcaccaagtnatctggnccagcctcccgcctccaagcacatcctgcctgcagagggtctggctaactgcctttnagctctcgagggatagagattctacaacctccctctgtcatcagttccagagccactcccctttgcactagtagttcttgctttcaaagaatgagggtgtgagggagggaggggtcaagaaacagagtgacagggaaacaggcagaacaagtcagggcaaaggaccccagcatgaagagttgtggagctggaggtggggaagcagcctcacatctcacacttccttccttctcttaaatgtgagcagctgactccaagccttgtggaaactctagaaggtagaaccagccatctggggaagctggccttacagatgccccgtctggcatagtggaggttcctgtgctctgagaacgcagtgtgaatctagacatccactgcagcctgggaagagctgtgttttcttcaaaagtctttaactttcacagtcacccctctaaagaaatgttctctgattgaaggcatgcttctattcctactttattgtgtttcatgcattctgccagagtaattacttttcataccaattcttggatgcagagaaatctctggtagtctaaggggatttcgatccaagtaaagctactatctcctattccatccagacttttccgtctgcctccattctctcagtcacatacctagaagcaagccagaaagcctgtccaaccaaaatcactctccaaagcccaagcactttattgttctccctgtctgttatcgagccaaggtgtatttggcctcattttatgccattagttgtctggctttcatggctctgcaccacattacagtcagagcaggaaggccagcagtggagatagaattatggcagaaacccagagtagaggcctctgctggtgagggagcctgcagcactctccacgctggtgggtcctagcatgcccaacagacccccatcccttcccatcagccttgggccttgagtctcattccaactcatcccctcccctttcccttctttccagtcccaggtgacacttgatgcctctgactcctttgaagagggcatcaagaagtgaaagaacaaagtccttttctgttcgggatctgggcccatcctgggagaggtttttggcagaaatggctgcagtggaaccctctgactgccagggtgaaatagtgctccagcaggctgcggtagactcgctgccagagtgggtcaggactggcccagaggacagggtcgtctcttgagagtcctcccagctccagggcctgattttaaagcagtaacacgaggatataggttatatacaggctcctggaaggcaggtgccgcagctcctgtgacaccccatatgcctgagcaagcttctccagcacaagagatgatgcaagtatgaatgggtacggggggagcttaaaacctgccaacactgagacttgatgccaggggccatgcacccgctctgccacctgctaggtctgtgcaatggtcagagcagaggtgtgtgatgagttcagctcccaagcacatccacacttaggaagtgttctgtgtgtttttaaataatccttaccatgtaaagattgtattacatttgtatacaaaatttttttgcattttacttttgtaatatttggggttttatagatttttattttatggccaagtatacttttgtaaggaaatgttgaagtcttgagtatttttattcttttaaaaaactatagttagtgtcaactgtgagcactgataaatattattcatgtgtggttttccttctttttaatccagactttttaagaaactgttttggcatagagctttacttaaaatgctgcttcattttacacattgtgaatactgaagattctaaaaaataaagatgcatttaaaatctctgtgctgttccattgtagaaatggtaatgtgcattgctttgccaaagtggtaattaaatgtttaatggtttagaactcctagttcacaacagggcttctcgtcatcacttgcagcgtgtgagcttccaaataagccgccatttctttggaaaacgcacgcacttaggcatggcgatctcctgttccgttaggaaatacggttatgttgacattatggttactgtgcttgtggttttgcaataaaccatgtattganagcaa

SEQ ID NO: 445 - DNA, 1810 bp, Homo sapiens
  misc_feature: Incyte ID No: 238263.2
atcaaaatcagcagaaagaaatggtggtgtatgggtggtccaccagtcagctgaaagaagagatgaactacatcaaagatgtgagagccactttggaaaacagcaacattaaggatcaaatcagaaatctgcagcagacgtatgaagcatccatggacaagctgagggaaaagcagaggcagttggaggtagcgcaagttgaaaaccagctgctaaaaatgaaggtggaatcgtcccaagaagccaatgctgaggtgatgcgagagatgaccaagaagctgtacagccagtatgaggagaagctgcaggaagaacagaggaagcacagtgctgagaaggaggctcttttggaagaaaccaatagttttctgaaagcgattgaagaagccaataaaaagatgcaagcagcagagatcagcctagaggagaaagaccagaggatcggggagctggacaggctgattgagcgcatggaaaaggaacgtcatcaactgcaacttcaactcctagaacatgaaacagaaatgtctggggagttaactgattctgacaaggaaaggtatcagcagttggaggaggcatcagccagcctccgtgagcggatcagacacctagatgacatggtgcattgccagcagaagaaagtcaagcagatggtcgaggagattgaatcattaaagaaaaagttgcaacagaaacagctcttaatactgcagcttttagaaaagatatctttcttagaaggagagaataatgaactacaaagcaggttggactatttaacagaaacccaggccaagaccgaagtggaaaccagagagataggagtgggctgtgatcttctacccagccaaacaggcaggactcgtgaaattgtgatgccttctaggaactacaccccatacacaagagtcctggagttaaccatgaagaaaactctgacttaggcactcagaggcatacactttttacagatggacaaaagctctggaaccctgtggcttcaaatcctttgggaagggtgactgttgtttcccctacacacagtgtaagccggaatgggaatcgctgaggctctgatccacttctaagacaggaaggaaagtgaaggcagagtgagcaggtaagagagggatatacaaggtcacatttcagacacccactcggcataccctgccgtactgcatcatcatttgttttctttgtagacactgaaatcctatcaggaggattccttcacaatgtattttatttgctagactttggttgggagggaaaaggacattaatttgaagtttcatgttattcatgccaggattgtttgatagagcatgaaggttttgtttacccataaaagtattagaggcagcgtttctctgatacagagaggcctgtccacaagaagcatgggcacccagccaaacttgaacctggaagggagggttcccggcctgcaggtgctctttcctcttggtcccaagcatctgtgcagggtcgtgggagccacactgagagacttgtgtgggccagacaagcttcattctgatgcgctagtcccttggtttaatttgtgccttatgctttcattggaccagctgaaatcactgtatttattcaacttgtgatttttttttctttctcactttaacttaaagagaattttatatgtcttggaaatttaataatttagtgttctcagtatcaattggtgtttttgttaaacgaatgaatcatctgttcatgcatgctctactttgatattataacctatgtcacatgtgtttaataaataccatatattttgttctac

SEQ ID NO: 446 - DNA, 3278 bp, Homo sapiens
  misc_feature: Incyte ID No: 146382.22
gactggaggcgccgcgaggagggcggcggcggcagccgggacagcagcgacctgggcccggcgcaggggccccggcggggcggccggaggggggcgggccctgggcccggacagaggggtccagcctccacagcgagcctgagagggccggcctcgggcctgcgccggggacagagagtccgcaggcagaattctggacagacggacagactgagcccgcggcagctggccttggagtagagaccgagaggcccaagcaaaagacggagccagacaggtccagcctccggacgcatctagaatggagctggtcagagctggagacgacttgtctttggacggagaccgggacagatggcctttggactgatccgcacaggtccgacctccagtttcagcccgaggaggccagcccctgggacacagccaggggttcatgggccctggacagagctggaaacgcatgggtcacagactcagccagagagggtcaagtcctgggctgataacctctggacccaccagaacagttccagcctccagactcacccagaaggagcctgtccctcaaaagagccaagtgctgatggctcctggaaagaattgtatactgatggctccaggacacaacaggatattgaaggtccctggacagagccatatactgatggctcccagaaaaaacaggatactgaagcagccaggaaacagcctggcactggtggtttccaaatacaacaggatactgatggctcctggacacaacctagcactgacggttcccagacagcacctgggacagactgcctcttgggagagcctgaggatggcccattagaggaaccagagcctggagaattgctgactcacctgtactctcacctgaagtgtagccccctgtgccctgtgccccgcctcatcattacccctgagacccctgagcctgaggcccagccagtgggacccccctcccgggttgaggggggcagcggcggcttctcctctgcctcttctttcgacgagtctgaggatgacgtggtggccgggggcggaggtgccagcgatcccgaggacaggtctgggagcaaaccctggaagaagctgaagacagttctgaagtattcaccctttgtggtctccttccgaaaacactacccttgggtccagctttctggacatgctgggaacttccaggcaggagaggatggtcggattctgaaacgtttctgtcagtgtgagcagcgcagcctggagcagctgatgaaagacccgctgcgacctttcgtgcctgcctactatggcatggtgctgcaggatggccagaccttcaaccagatggaagacctcctggctgactttgagggcccctccattatggactgcaagatgggcagcaggacctatctggaagaggagctagtgaaggcacgggaacgtccccgtccccggaaggacatgtatgagaagatggtggctgtggaccctggggcccctacccctgaggagcatgcccagggtgcagtcaccaagccccgctacatgcagtggagggaaaccatgagctccacctctaccctgggcttccggatcgagggcatcaagaaggcagatgggacctgtaacaccaacttcaagaagacgcaggcactggagcaggtgacaaaagtgctggaggacttcgtggatggagaccacgtcatcctgcaaaagtacgtggcatgcctagaagaacttcgtgaagctctggagatctcccccttcttcaagacccacgaggtggtaggcagctccctcctcttcgtgcacgaccacaccggcctggccaaggtctggatgatagacttcggcaagacggtggccttgcccgaccaccagacgctcagccacaggctgccctgggctgagggcaaccgtgaggacggctacctctggggcctggacaacatgatctgcctcctgcaggggctggcacagagctgagctgctcagccaccatcaggttaattggatggcgccagtctggctggaggagccctgagatgccatgggaggcctgaggttggccacgggggagctggcctccagggacgggagagattgtgtcatgtgccacacgagaccaacgtggaaaagtctgaagggccttgggagaccaggtagcacctggccccatcatgatgcaggggttttggggacctggaaggaaggtgatgaggcagtgagtcagaaaaaccagaacggggtccccggatctgccgggaaggcttctgaggggctgccctgagagcattcagttcacatgtcacagggtatggtgtgacagggtgcctgtggacacatgaatcacttctaacctgcctccctgtcagcctccaggctgccagctggctgaggccagggactgggtcaggctcatctgtggcgcctcagagggtcagcatcattggtgaacagatgcaggcgctgctggaccatctggggagagtgacagtccatgtcttcaccagggagccatttgagtgctgagcgacaagaggctcagagggcatgaccccatgggactggatgcggcctgagggctgataccgctgggcggtatcctgccctgctgtggccctgtgggatcctccgtgttcctcggcggactctgctgacctcctgcagacccaaaccacagccacatcccagcttctgtgccagcactgtgacagtacctcgctcctctgtgcaccagatccggcctcaggacttacacctcctgcctgacccccaggcttctctctcctttctcccagcaaactgcagtggcagaaaggaggttcagaggctgggaaagtgggcctccccttgcaactcagagctgctgcactcaggagggccccatccaatccccggcccctgcagggaaaagcgctgggtgtgtgtcagaggcgcagggtgggtggggctgccagccaggaccctggcctgcagcctgatccaaaccaaagactgtagaaccctggggtgtggctaacggcccctccagcacccatagccaggtcttcctggcccttgaggctgggctggcggacaggcacctacctcttccttaagctgaagctcccacactgtcttccagggctgaggagatgctctccttttctactgaccatcttgatacttatttatacgagaggcagttgctggacggggtagtactgggaagcaggaggcagaatggctctgctgagcctcctacccatgacaacaccccaataaacagaacattcagagcc

SEQ ID NO: 447 - DNA, 493 bp, Homo sapiens
  misc_feature: Incyte ID No: 146382.25
cagcaggacctatctggaagaggagctagtgaaggcacgggaacgtccccgtccccggaaggacatgtatgagaagatggtggctgtggaccctggggcccctacccctgaggagcatgcccagggtgcagtcaccaagccccgctacatgcagtggagggaaactatgagctccacctctaccctgggcttccggatcgagggcatcaagaaggcagatgggacctgtaacaccaacttcaagaagacgcaggcactggagcaggtgacaaaagtgctggaggacttcgtggatggagaccacgtcatcctgcaaaagtacgtggcatgcctagaagaacttcgtgaagctctggagatctcccccttcttcaagacccacgaggtgcgagccctggcttccatgggtggatgtatgggtgtcggggtccaggtgcatggaggggaaaccattgatgagttacaggtcaaagatataaaaaggggctgggcg

SEQ ID NO: 448 - DNA, 3107 bp, Homo sapiens
  misc_feature: Incyte ID No: 345705.7
cacttcacaccagtctattctgccagtcccatatttggagttgattatgagatggaagaaaagccccagccgctcgaagctctgacagtcgaacaaattcaagatgatgtagaaatagactctgatggtcacacggatgcttttgtggcttattttgctgatggcaataaggtttctcacagaatggattcccagcgggaacttgcagaggaactgcggctttaccaatccacccttcttcaggatggtctaaaagatctcctggatgagaaaaaattcatcgattgcaccctaaaagcaggtgacaaaagtcttccttgccacagattgattttgtcagcttgtagtccttacttccgtgagtactttttatctgaaattgatgaggcgaaaaaaaaggaggtagtgctagacaatgtggatcctgctatacttgatttaatcatcaaatacctgtactctgccagtattgatctcaatgacggaaatgtgcaagatatttttgcattggccagccgctttcagatcccctcagtgtttactgtctgcgtttcttatcttcagaaaagacttgctcctggtaactgtctagccatcctaagattaggacttcttcttgactgcccgagactcgccatttctgcccgtgaatttgtgtctgatcgctttgtacagatttgtaaggaagaggactttatgcaactgtctccacaggaactgatctcagtcatttcaaatgacagcctaaatgtagaaaaagaagaagcagtatttgaggcagtgatgaaatgggtgcgaacagacaaggaaaacagggttaaaaaccttagtgaagtgtttgattgtatccgttttcgccttatgacagaaaaatattttaaggatcatgttgagaaagatgatataattaaaagcaacccagacctccagaaaaaaatcaaagttctaaaagatgctttcgcaggcaaactcccagaacctagcaaaaatgccgcgaagactggggctggtgaggtgaatggtgatgttggtgatgaagatttacttcctggttacctgaatgacattcccaggcatggaatgtttgtaaaagacctcatcctcttggttaatgacacagcagcagtggcttatgaccccacggaaaatgaatgctaccttactgcactggctgagcagattcccagaaatcattccagcattgttacccagcaaaatcagatatatgtggtaggaggactatatgtggatgaagaaaataaggatcaacctctacagtcatacttcttccagctcgatagcatagcatctgaatgggttggacttccacctctgccttcagccaggtgtctcttcggtctgggagaggtggatgataaaatctatgtagttgcaggcaaagaccttcaaacagaggcttcgctggattcagtattatgctatgatcctgtggctgcaaaatggaacgaagtaaaaaaactccctatcaaagtctatggccataatgtgatttcacataaagggatgatatattgtctaggaggaaagacagatgacaaaaaatgtacaaacagggtgtttatcttcaaccccaaaaaaggagattggaaagatctggctccaatgaaaattcctcgttccatgtttggagtagcagtccataaaggcaaaattgtgattgcaggaggtgtcactgaagatggtctttcagcttcagttgaagcttttgaccttacaacaaataaatgggatgtaatgaccgaatttccccaagaaagaagctccatcagtttggtcagcctggctggatctctgtatgcaattggtggttttgctatgattcaactggagtctaaagaatttgcacccactgaagtcaatgacatatggaagtatgaagatgataaaaaagaatgggctgggatgttgaaggaaatacgttatgcttcaggagctagttgcctagcaacacgtttaaatctcttcaaactgtctaaactgtgaacaaggtgacaaaacataatagattgggaggtggtttgtttggtgaatggggctttaatttattctgttttttaaaagcttgtacagacactcatgtagaaattattcaagaagttattgtctaagagatgagcagtaggtaagaaaacctcagtcattgactcttcaatgtaatgatcagagtttaaaaccattttctaataataaattaaatcttcagttgaacaaattattttgtgaatctgtttcactcaatggattgtaaagaaggctcctaaatttgagttgtttgctaatcatttcatttgcatcattagggtatccttaaactgattttctattacaattggaagtggagaatatgtgcatctacactaaaaaaatgtttaagatatcaaaaacctctcctcgtgcttcaaaatgacaggaatcctgtgcattatactaagaattacatgccataagatgacttcagaaatcctacttcagaagtgtaataaatggatggggaaatcgtttgatggggaaaagtctcttgtaagtaaaagtagtcaaattcaaatggccttttctctccattctttttgcgacactggcgtattatttgtggtttccaaatcaaatttttaaaattttaatttaaaaccagtaaatcacagtcttcaagccattaactacagcatctgtggcaggagggtgagggagcacccttaggaaatggattgattctttaaactgctgggacagcagttggggtcagtgggtgatgtggaggaggaagtgtattcactggtttaaattttggctacactccatgaaagggctacctatttgctaaatttctgacagcaaggaaggtgactgtattatttcattttctgggatgtgatatcctccattcactgttccttcttagtgcatatagtaagttgactcctcaatctgctcataaccatcacattcaactctgtgcaagtcatcaattaatcatcacttttagccacacaccaacttatgagtctcacatagctttcatagacatatatttgacttctatccttacccatattattttctgaaaaacctgacttgggactaatttg

SEQ ID NO: 449 - DNA, 2231 bp, Homo sapiens
  misc_feature: Incyte ID No: 198212.10
tgagacattcagccatgtagacaagaagagaccaagacttgagatccacagaggcatgggccccctgggggacagccagtcaagatacagagccgtccaaaaacttaagacagagactgaagtgtgcccagacacagagatgctgagtgaagcagagacagacaccagaaactgagactaagtgggggcagagagacctaggtggtctgacagcttccaggacagcccctgacttacccgggcctgaaccattgggaggtgaggctgtggggaaacagaaactctgagcctaccgatcccccatgaggcagaggccctgagacaggttctctccccttgccaccatgagcgagtcatttgactgtgcaaaatgcaacgagtccctgtatggacgcaagtacatccagacagacagcggcccctactgtgtgccctgctatgacaatacctttgccaacacctgtgctgagtgccagcagcttatcgggcatgactcgagggagctgttctatgaagaccgccatttccacgagggctgcttccgctgctgccgctgccagcgctcactagccgatgaacccttcacctgccaggacagtgagctgctctgcaatgactgctactgcagtgcgttttcctcgcagtgctccgcttgtggggagactgtcatgcctgggtcccggaagctggaatatggaggccagacatggcatgagcactgcttcctgtgcagtggctgtgaacagccactgggctcccgttcttttgtgcccgacaagggtgctcactactgcgtgccctgctatgagaacaagtttgctcctcgctgcgcccgctgcagcaagacgctgacacagggtggagtgacataccgtgatcagccgtggcatcgagaatgtctggtctgtaccggatgccagacgcccctggcagggcagcagttcacctcccgggatgaagatccctactgtgtggcctgttttggagaactctttgcacctaagtgcagcagctgcaagcgccccatcgtaggactcggtggaggcaagtatgtgtcctttgaagaccgacactggcaccacaactgcttctcctgcgcccgctgctctacctccctggtgggccagggcttcgtaccggatggagaccaagtgctctgccagggctgtagccaggcagggccctaagccagggctcctggacccaggctttcccataccacgggcccaggactgtggctccttttctaaaccacctctgggactcagctccccccgccaaaaaaaatgggtctccttctgggctccaggattgtctccccactccagcatccccaaactggtactccctgacccaggcccccaatcctgggctcttacagagcctccatgagtcaagccccctccccacacctggactccagaattcaccctctcccctgcagtctgggttcccagactgagtcctctccccaaatcagggctctagacccgagccctccaaacctggactctgggacttaggcccccttaaatctagacttctctttataggtttcaggtctcctatgggtgcctgggaagtccttgaaagtggactgttctcaggcttgacctgccccaccccatccccgcggttgaggctgtgggggcagcagatcaggagcccactgataaggggccctagggtacagggtgctgcccagcaggtcgccaccgagtgtcttctcattttatttcagctccattttgcccatagatgggcagaggggtgagattggctcatcccccttccagattctgcaataaagcggtgtgaggaagcagggaaaaaaaaaaaagggcggccgccgactattggactcgccgacccggaaataatttccggccggttccctgggagggaaccagttttccttaagagtggctcgtttaaaaacctgggggaaaaacaaggggtaaaaacctgttcccccgggggagaatttttttctcccggcctcaaatattcccccaccaccaaatcatgagcgggccccgggaaaagccatataaagtgttttaaaaacccccttgggggggcgcaccatcaaaagggggggtgtgcagccacagccccctccaatatttcaatttgtggggcgtttccgcgccgacacaatcttgccgcccctgttttgtctcacaccaggcgcggcgggtaaaaacactcctcttgacgtgggggatgaa

SEQ ID NO: 450 - DNA, 1641 bp, Homo sapiens
  misc_feature: Incyte ID No: 198212.6
ctgcagtcggcagcctcgccggcagctcgctcggcccccgcttggcccggcccgcaggtaggagccgccgagggacgcggcgcccggttcccggccccgcctgcgccgcgcgctccccgctcccgccgcccgcttcgagggttctctccccttgccaccatgagcgagtcatttgactgtgcaaaatgcaacgagtccctgtatggacgcaagtacatccagacagacagcggcccctactgtgtgccctgctatgacaatacctttgccaacacctgtgctgagtgccagcagcttatcgggcatgactcgagggagctgttctatgaagaccgccatttccacgagggctgcttccgctgctgccgctgccagcgctcactagccgatgaacccttcacctgccaggacagtgagctgctctgcaatgactgctactgcagtgcgttttcctcgcagtgctccgcttgtggggagactgtcatgcctgggtcccggaagctggaatatggaggccagacatggcatgagcactgcttcctgtgcagtggctgtgaacagccactgggctcccgttcttttgtgcccgacaagggtgctcactactggcgtgccctgctatgagaacaagtttgctcctcgctgcgcccgctgcagcaagacgctgacacagggtggagtgacataccgtgatcagccgtggcatcgagaatgtctggtctgtaccggatgccagacgcccctggcagggcagcagttcacctcccgggatgaagatccctactgtgtggcctgttttggagaactctttgcacctaagtgcagcagctgcaagccgccccatcgtaggactcggtggaggcaagtatgtgtcctttgaagaccgacactggcaccacaactgcttctcctgcgcccgctgctctacctccctggtgggccagggcttcgtaccggatggagaccaagtgctctgccagggctgtagccaggcagggccctaagccagggctcctggacccaggctttcccataccacgggcccaggactgtggctccttttctaaaccacctctgggactcagctccccccgccaaaaaaaatgggtctccttctgggctccaggattgtctccccactccagcatccccaaactggtactccctgacccaggcccccaatcctgggctcttacagagcctccatgagtcaagccccctccccacacctggactccagaattcaccctctcccctgcagtctgggttcccagactgagtcctctccccaaatcagggctctagacccgagccctccaaacctggactctgggacttaggcccccttaaatctagacttctctttataggtttcaggtctcctatgggtgcctgggaagtccttgaaagtggactgttctcaggcttgacctgccccaccccatccccgcggttgaggctgtgggggcagcagatcaggagcccactgataaggggccctagggtacagggtgctgcccagcaggtcgccaccgagtgtcttctcattttatttcagctccattttgcccatagatgggcagaggggtgagattggctcatcccccttccagattctgcaataaagcggtgtgaggaagc

SEQ ID NO: 451 - DNA, 614 bp, Homo sapiens
  misc_feature: Incyte ID No: 900031.8
cggcagaagatcttgctagatcggaacagcacgagcacgtagcaggtctcctaacttttcaatgacattttttttaactactatattgattgtcctttaaaaaagaaaagtgcatatttatccaaaatgtgtatttcttatacgcttttctttgttataccatttcctcagcttatctcttttatatttgtaggagaaactcccatgtatggaatcccactgtatgatttataaacagacaatatgtgagtgccttttgcagaagagggtgtgtttgaaatcatcggagtcagccaggagctgtcaccaaggaaacgctacctctctgtcccttgctgtatgctgatcatcgccagaggtgcttcaccctgagttttgttttgtattgttttctgacagtttttctgttttgtttggcaaggaaaggggagaagggaatcctcctccagggtgattttatgatcagtgttgttgctctaggaagacatttttccgtttgcttttgttccaatgtcaatgtgaacgtccacatgaaacctacacactgtcatgcttcatcattccctctcatctcaggtagaaggttgacacagttgtagggttacagagaccta

SEQ ID NO: 452 - DNA, 6046 bp, Homo sapiens
  misc_feature: Incyte ID No: 900031.4
gagcgcgcgcaaaccgcagcgcggctggaggcagtcggagtgggtgggcgcgccgcaagcccgcttgcagggtccccattggccgcctgccggccgccctccgcccaaaaggcggcaaggagccgagaggctgcttcggagtgtgaggaggacagccggaccgagccaacgccggggactttgttccctccgcggaggggactcggcaactcgcagcggcagggtctggggccggcgcctgggagggatctgcgccccccactcactccctagctgtgttcccgccgccgccccggctagtctccggcgctggcgcctatggtcggcctccgacagcgctccggagggaccgggggagctcccaggcgcccgggactggagactgatgcatgagggggctacggaggcgcaggagcggtggtgatggtctgggaagcggagctgaagtgccctgggctttggtgaggcgtgacagtttatcatgaccgtgttcaggcaggaaaacgtggatgattactacgacaccggcgaggaacttggcagtggacagtttgcggttgtgaagaaatgccgtgagaaaagcaccggcctccagtatgccgccaaattcatcaagaaaaggaggactaagtccagccggcggggtgtgagccgcgaggacatcgagcgggaggtcagcatcctgaaggagatccagcaccccaatgtcatcaccctgcacgaggtctatgagaacaagacggacgtcatcctgatcttggaactcgttgcaggtggcgagctgtttgacttcttagctgaaaaggaatctttaactgaagaggaagcaactgaatttctcaaacaaattcttaatggtgtttactacctgcactcccttcaaatcgcccactttgatcttaagcctgagaacataatgcttttggatagaaatgtccccaaacctcggatcaagatcattgactttgggttggcccataaaattgactttggaaatgaatttaaaaacatatttgggactccagagtttgtcgctcctgagatagtcaactatgaacctcttggtcttgaggcagatatgtggagtatcggggtaataacctatatcctcctaagtggggcctccccatttcttggagacactaagcaagaaacgttagcaaatgtatccgctgtcaactacgaatttgaggatgaatacttcagtaataccagtgccctagccaaagatttcataagaagacttctggtcaaggatccaaagaagagaatgacaattcaagatagtttgcagcatccctggatcaagcctaaagatacacaacaggcacttagtagaaaagcatcagcagtaaacatggagaaattcaagaagtttgcagcccggaaaaaatggaaacaatccgttcgcttgatatcactgtgccaaagattatccaggtcattcctgtccagaagtaacatgagtgttgccagaagcgatgatactctggatgaggaagactcctttgtgatgaaagccatcatccatgccatcaacgatgacaatgtcccaggcctgcagcaccttctgggctcattatccaactatgatgttaaccaacccaacaagcacgggacacctccattactcattgctgctggctgtgggaatattcaaatactacagttgctcattaaaagaggctcgagaatcgatgtccaggataagggcgggtccaatgccgtctactgggctgctcggcatggccacgtcgataccttgaaatttctcagtgagaacaaatgccctttggatgtgaaagacaagtctggagagatggccctccacgtggcagctcgctatggccatgctgacgtggctcaagttacttgtgcagcttcggctcaaatcccaatatccaggacaaaggaagaagaaacccccctgcactgtgctgcttggcacggctattactctgtggccaaagccctttgtgaagccggctgtaacgtgaacatcaagaaccgagaaggagagacgcccctcctgacagcctctgccaggggctaccacgacatcgtggagtgtctggccgaacatggagccgatcttaatgcttgcgacaaggacggacacattgcccttcatctggctgtaagacggtgtcagatggaggtaatcaagactctcctcagccaagggtgtttcgtcgattatcaagacaggcacggcaatactcccctccatgtggcatgtaaagatggcaacatgcctatcgtggtggccctctgtgaagcaaactgcaatttggacatctccaacaagtatgggcgaacgcctctgcaccttgcggccaacaacggaatcctagacgtggtccggtatctctgtctgatgggagccagcgttgaggcgctgaccacggacggaaagacggcagaagatcttgctagatcggaacagcacgagcacgtagcaggtctccttgcaagacttcgaaaggatacgcaccgaggactcttcatccagcagctccgacccacacagaacctgcagccaagaattaagctcaagctgtttggccactcgggatccgggaaaaccacccttgtagaatctctcaagtgtgggctgctgaggagctttttcagaaggcgtcggcccagactgtcttccaccaactccagcaggttcccaccttcacccctggcttctaagcccacagtctcagtgagcatcaacaacctgtacccaggctgcgagaacgtgagtgtgaggagccgcagcatgatgttcgagccgggtcttaccaaagggatgctggaggtgtttgtggccccgacccaccacccgcactgctcggccgatgaccagtccaccaaggccatcgacatccagaacgcttatttgaatggagttggcgatttcagcgtgtgggagttctctggaaatcctgtgtatttctgctgttatgactattttgctgcaaatgatcccacgtcaatccatgttgttgtctttagtctagaagagccctatgagatccagctgaaccaagtgattttctggctcagtttcctgaagtcccttgtcccagttgaagaacccatagccttcggtggcaagctgaagaacccactccaagttgtcctggtggccacccacgctgacatcatgaatgttcctcgaccggctggaggcgagtttggatatgacaaagacacatcgttgctgaaagagattaggaacaggtttggaaatgatcttcacatttcaaataagctgtttgttctggatgctggggcttctgggtcaaaggacatgaaggtacttcgaaatcatctgcaagaaatacgaagccagattgtttcggtctgtcctcccatgactcacctgtgtgagaaaatcatctccacgctgccttcctggaggaagctcaatggacccaaccagctgatgtcgctgcagcagtttgtgtacgacgtgcaggaccagctgaaccccctggccagcgaggaggacctcaggcgcattgctcagcagctccacagcacaggcgagatcaacatcatgcaaagtgaaacagttcaggacgtgctgctcctggacccccgctggctctgcacaaacgtcctggggaagttgctgtccgtggagaccccacgggcgctgcaccactaccggggccgctacaccgtggaggacatccagcgcctggtgcccgacagcgacgtggaggagctgctgcagatcctcgatgccatggacatctgcgcccgggacctgagcagcgggaccatggtggacgtcccagccctgatcaagacagacaacctgcaccgctcctgggctgatgaggaggacgaggtgatggtgtatggtggcgtgcgcatcgtgcccgtggaacacctcacccccttcccatgtggcatctttcacaaggtccaggtgaacctgtgccggtggatccaccagcaaagcacagagggcgacgcggacatccgcctgtgggtgaatggctgcaagctggccaaccgtggggccgagctgctggtgctgctggtcaaccacggccagggcattgaggtccaggtccgtggcctggagacggagaagatcaagtgctgcctgctgctggactcggtgtgcagcaccattgagaacgtcatggccaccacgctgccagggctcctgaccgtgaagcattacctgagcccccagcagctgcgggagcaccatgagcccgtcatgatctaccagccacgggacttcttccgggcacagactctgaaggaaacctcactgaccaacaccatgggggggtacaaggaaagcttcagcagcatcatgtgcttcgggtgtcacgacgtctactcacaggccagcctcggcatggacatccatgcatcagacctgaacctcctcactcggaggaaactgagtcgcctgctgcacccgcccgaccccctggggaaggactggtgccttctcgccatgaacttaggcctccctgacctcgtggcaaagtacaacaccagtaacggggctcccaaggatttcctccccagccccctccacgccctgctgcgggaatggaccacctaccctgagagcacagtgggcaccctcatgtccaaactgagggagctgggtcgccgggatgccgcagactttttgctgaaggcatcctctgtgttcaaaatcaacctggatggcaatggccaggaggcctatgcctcgagctgcaacagcggcacctcttacaattccattagctctgttgtatcccggtgagggcagcctctggcttgggcagggtctgtttggactgcagaagcaagggggtgatgtagcccatccttccctttggagatgctgagggtgtttcttcctgcacccacagccagggggatgccactcctccctccggcttgacctgtttctctgccgctacctccctccccgtctcattccgttgtctgtggatggtcattgcagtttaagagcagaacagatcttttactttggccgcttgaaaagctagtgtacctcctctcagtgttttggactccatctctcatcctccagtaccttgcttcttactgataattttgctggaattcctaacttttcaatgacattttttttaactactatattgattgtcctttaaaaaagaaaagtgcatatttatccaaaatgtgtatttcttatacgcttttctttgttataccatttcctcagcttatctcttttatatttgtaggagaaactcccatgtatggaatcccactgtatgatttataaacagacaatatgtgagtgccttttgcagaagagggtgtgtttgaaatcatcggagtcagccaggagctgtcaccaaggaaacgctacctctctgtcccttgctgtatgctgatcatcgccagaggtgcttcaccctgagttttgttttgtattgttttctgacagtttttctgttttgtttggcaaggaaaggggagaagggaatcctcctccagggtgattttatgatcagtgttgttgctctaggaagacatttttccgtttgcttttgttccaatgtcaatgtgaacgtccacatgaaacctacacactgtcatgcttcatcattccctctcatctcaggtagaaggttgacacagttgtagggttacagagacctatgtaagaattcagaagacccctgactcatcatttgtggcagtcccttataattggtgcatagcagatggtttccacatttagatcctggtttcataacttcctgtacttgaagtctaaaagcagaaaataaaggaagcaagttttcttccatgattttaaattgtgatcgagttttaaattgataggagggaacatgtcctaattcttctgtcctgagaagcatgtaatgttaatgttatatcatatgtatatatatatatgcactatgtatatacatatatattaatactggtatttttacttaatctataaaatgtcgttaaaaagttgtttgtttttttctttttttataaataaactgttgctcgttgcatt

SEQ ID NO: 453 - DNA, 1826 bp, Homo sapiens
  misc_feature: Incyte ID No: 475365.4
  unsure 1755: a, t, c, g, or other
[439 bp omitted]cttccttggtatagtggaggatttgaggattggaatatagagtagagtgcttgcttaagcctctgcttgaaaccctttatcttttggggatgctggttcctggagggctgggatatgatagatccttagcccaacacagacaagagattgtggacaagtcagtgagtccatggagcctggagacgtattcctataacatataccaccccatgggagagatctatgagtggatgagagagatcagtgagaagtacaaggaagtggtgacacagcatttcctaggagtgacctatgagacccaccccatatattatctgaagatcagccaaccatctggtaatcccaagaaaatcatttggatggactgtggaattcacgccagagaatggattgctcctgctttttgccaatggttcgtcaaagaaattctacaaaaccataaagacaactcaaggatacgcaagctccttaggaacctggacttctatgtccttccagttcttaacatagatggttatatctacacttggacaactgatcgtctttggaggaaatcccgttcaccccataataatggcacatgttttgggacggatctcaatcgaaatttcaatgcatcttggtgtagtattggtgcctctagaaactgccaagatcaaacattctgtgggacagggccagtgtctgaaccagagactaaagctgttgccagcgtcatagagagcaagaaggatgatattttgtgcttcctgaccatgcactcttatgggcagttaattctcacaccttacggctacaccaaaaataaatcaagtaaccacccagaaatgattcaagttggacagaaggcagcaaatgcattgaaagcaaagtatggaaccaattatagagttggatcgagtgcagatattttatatgcctcatcagggtcttcaagagattgggcccgagacattgggattcccttctcatatacgtttgagctgagggacagtggaacatatgggtttgttctgccagaagctcagatccagcccacctgtgaggagaccatggaggctgtgctgtcagtcctggatgatgtgtatgcgaaacactggcactcggacagtgctggaagggtgacatctgccactatgctgctgggcctgctggtgtcctgcatgtctcttctctaagtgcattctgcccaggcttttttctgccagaaattcccctttatttttcctcctagtaaagtctttctttgatactaattctgacattacctgtggaatttttgctgacttccacagatttttttttctctccttctntaactgtttgtacacactttaatgtaataatttacagacttgtgtagtgagataggatattacatgccctg

SEQ ID NO: 454 - DNA, 1613 bp, Homo sapiens
  misc_feature: Incyte ID No: 222810.1
gtcactctccccaggagacccagacctagaactacccagagcaagaccacagctggtgaacagtccaggagcagacaagatggagacaaattcctctctccccacgaacacctctggagggacacctgctgtatctgctggctatctcttcctggatatcatcacttatctggtatttgcagtcacctttgtcctcggggtcctgggcaacgggcttgtgatctgggtggctggattccggatgacacacacagtcaccaccatcagttacctgaacctggccgtggctgacttctgtttcacctccactttgccattcttcatggtcaggaaggccatgggaggacattggcctttcggctggttcctgtgcaaattcctctttaccatagtggacatcaacttgttcgggaagtgtcttcctgatcgccctcattgctctggaccgctgtgtttgcgtcctgcatccagtctggacccagaaccaccgcaccgtgagcctggccaagaaggtgatcattgggccctgggtgatggctctgctcctcacattgccagttatcattcgtgtgactacagtacctggtaaaacggggacagtagcctgcacttttaacttttcgccctggaccaacgaccctaaagagaggataaacgtggccgttgccatgttgacggtgagaggcatcatccggttcatcattggcttcagcgcacccatgtccatcgttgctgtcagttatgggcttattgccaccaagatccacaagcaaggcttgattaagtccagtcgtcccttacgggtcctctcctttgtcgcagcagccttttttctctgctggtccccatatcaggtggtggcccttatagccacagtcagaatccgtgagttattgcaaggcatgtacaaagaaattggtattgcagtggatgtgacaagtgccctggccttcttcaacagctgcctcaaccccatgctctatgtcttcatgggccaggacttccgggagaggctgatccacgcccttcccgccagtctggagagggccctgaccgaggactcaacccaaaccagtgacacagctaccaattctactttaccttctgcagaggtggcgttacaggcaaagtgaggagggagctgggggacactttcgagctcccagctccagcttcgtctcaccttgagttaggctgagccacaggcatttcctgcttattttaggattacccactcatcagaaaaaaaaaaaaagcctttgtgtcccctgatttggggagaataaacagatatgagtttattattgacttcttttttgattttggacctcagcctcgggtggtcagggtgggaaatgataggaagaagctgtcatctgcatcctagtttgcctgaaatgaacccaaataatacccattattattagtcctgaattatgagtagtgaatgatacccatcattctggcatcatgatgagtagtgtccacttccattctgaaaagtgccctgctgtgaaaaataaattatatagtcatcctaggtaaatgaaggaggagggagaagtgtgaaagagtatggcttaaatcagacaagatatacaagaagatacttt

SEQ ID NO: 455 - DNA, 3277 bp, Homo sapiens
  misc_feature: Incyte ID No: 1084493.6
gccagccagtgggaattcccccgagagcggctgcacctggggagagtgctcggctacggcgccttcgggaaggtggtggaagcctccgctttcggcatccacaagggcagcagctgtgacaccgtggccgtgaaaatgctgaaagagggcgccacggccagcgagcagcgcgcgctgatgtcggagctcaagatcctcattcacatcggcaaccacctcaacgtggtcaacctcctcggggcgtgcaccaagccgcagggccccctgcatggtgatcgtggagttctgcaagtacggcaacctctccaacttcctgcgcgccaagcgggaccgccttcagcccctgcgcggagaagtctcccgagcagcgcggacgcttccgcgccatggtggagctcgccaggctggatcggaggcggccggggagcagcgacagggtcctcttcgcgcggttctcgaagaccgagggcggagcgaggcgggcttctccagaccaagaagctgaggacctgtggctgagcccgctgaccatggaagatcttgtctgctacagcttccaggtggccagagggatggagttcctggcttcccgaaagtgcatccacagagacctggctgctcggaacattctgctgtcggaaagcgacgtggtgaagatctgtgactttggccttgcccgggacatctacaaagaccccgactacgtccgcaagggcagtgcccggctgcccctgaagtggatggcccctgaaagcatcttcgacaaggtgtacaccacgcagagtgacgtgtggtcctttggggtgcttctctgggagatcttctctctgggggcctccccgtaccctggggtgcagatcaatgaggagttctgccagcggctgagagacggcacaaggatgagggccccggagctggccactcccgccatacgccgcatcatgctgaactgctggtccggagaccccaaggcgagacctgcattctcggagctggtggagatcctgggggacctgctccagggcaggggcctgcaagaggaagaggaggtctgcatggccccgcgcagctctcagagctcagaagagggcagcttctcgcaggtgtccaccatggccctacacatcgcccaggctgacgctgaggacagcccgccaagcctgcagcgccacagcctggccgccaggtattacaactgggtgtcctttcccgggtgcctggccagaggggctgagacccgtggttcctccaggatgaagacatttgaggaattccccatgaccccaacgacctacaaaggctctgtggacaaccagacagacagtgggatggtgctggcctcggaggagtttgagcagatagagagcaggcatagacaagaaagcggcttcagctgtaaaggacctggccagaatgtggctgtgaccagggcacaccctgactcccaagggaggcggcggcggcctgagcggggggcccgaggaggccaggtgttttacaacagcgagtatggggagctgtcggagccaagcgaggaggaccactgctccccgtctgcccgcgtgactttcttcacagacaacagctactaagcagcatcggacaagacccccagcacttgggggttcaggcccggcagggcgggcagagggctggaggcccaggctgggaactcatctggttgaactctggtggcacaggagtgtcctcttccctctctgcagacttcccagctaggaagagcaggactccaggcccaaggctcccggaattccgtcaccacgactggccagggccacgctccagctgccccggcccctccccctgagattcagatgtcatttagttcagcatccgcaggtgctggtcccggggccagcacttccatgggaatgtctctttggcgacctcctttcatcacactgggtggtggcctggtccctgttttcccacgaggaatctgtgggtctgggagtcacacagtgttggaggttaaggcatacgagagcagaggtctcccaaacgccctttcctcctcaggcacacagctactctccccacgagggctggctggcctcacccacccctgcacagttgaagggaggggctgtgtttccatctcaaagaaggcatttgcagggtcctcttctgggcctgaccaaacagccaactagcccctggggtggccaccagtatgacagtattatacgctggcaacacagaggcagcccgcacacctgcgcctgggtgttgagagccatcctgcaagtctttttcaacagaacttcacagactgttagagctgctgagaagaatttgctttccgaattcagcctggaaggcgcccagggacagctgtactgagtctagatgactctgacccccgccccaggtcaaggccagcagagcagtcagtgcctctggagaaggcccttgctctcccacctggcccagactccgaggagcctgggtctggagctgccggtctggttcttccctttagagcccggatctgccacctgcggcccctcccaagccgtgaaccagctcatgagagatgaacactgtgggatccactcaggaaggctcggggctggcacaaaggaccacccagcattgccctgtgccacccagcactcagtggacattctggggacctgccttcagccttttcctgccctgtgcctgacatcagcaccctggctggtcagaatgccgccctcccagaggagcagccgagagatcccctgaaggctggaggcattctgctcaggacccctatcccagctcacagtgcccaaccatctcaccaggagaaagagccacatccccacgttaggaccacggagactgaccaccaccctgaccccccaaacccacgcaccagacgcttgcaggacaggcgccgcgcagcgggcaggggcttgcccggccgaccctcccctccccacctcccccactgcgcgttactccaggatatgccgagtgcacgtataaggtcatcttcgtcgtccccgtggacctcccccttcctctgcacgtcgtccaacgtgggactggcgtgtcgggcttccctgggaggatctggaggttgttctctgcagagaaccagcctggctcctggcgcgcacctctgctcccttctcctcactacccacccacgcatgtaccgggaaaaaaactactatgcccttctagaccatgttctgagaaaagatcgaaaatatttaacaagagataataataaatctgatgccggtctttgtgtgtgttgcgg

SEQ ID NO: 456 - DNA, 5979 bp, Homo sapiens
  misc_feature: Incyte ID No: 979005.2
  unsure 833-875, 884, 895, 898, 3542, 3548-3549, 3552, 4259: a, t, c, g, or other
ggcttccagagcttgtcggttaaagaagaaagcccagtatgaagctaataaagtgaaattatggggcctcaacacagaatatgataatttattgtttgtaatcaactccatcaagcaagagattgtaaaccgggtacagaatccaagagatgagagaggacccaacatggggcagaagcttgaaatcctcattaaagatactctcggtctaccagttgctgggcaaacctcagaatttgttaaccaagtgttagagaagactgcagaagggaatcccactggaggccttgtaggattaaggataccaacatcaaaggtgtaatcagcctcattggaccactggtcagaaatgtctgcgttttgtcatgttatccattgtaaattttcattctgttttgcatgtcagttagcattatgtaaacatttacaattaggttacattgttttaagaactaagtagcataagtgaagcatgatccaaaatacttgattattgcattttcagagcataaaccatgattaaaactgctactggcatcagaattgaaaatcatatgtttaagtaaatgttaggtacagattacaaaaatctgttaaagcaaaacattttggaggagtgaaatagtaaaatgccaagtattgtggcagatttatgctctgaaccacacaaaaaaattgaggaagcatttttttaaacagtcggtttaaattgtttttagaattattgctttttgttctaattttccacaaccattaatctcacttgtatatggcacacccagcacttgtgcctgtgggccatattagatgttcattgtcagagctcaagatgnnnnnnnnnnnnnnnnnnnnnnnnnnnnnnnnnnnnnnnnnnncaccaatgnctgtgcaagtnagnaaaaaaaaagcatattctttgtgccttgtattttggggaaactctaaaactggtaatattttgtatgatgaaaaccctaatgagaaaaaacaagatatatagatggaaaaattatggggtttaaatgtttttttgttccaactctttttcagattttttgaatgtatataggactatgttgaaatgtagatatatgccacagagtctgtgtattgtataaaaaacaaaacaaaaaacaacaaaaaaaagatggctctagaaaactcatatttcggtacttgaccggaagaagacaaatacttgcacattattgcgattgttttattttttgtaccaaagacaaatgcaactgatatggcaaactgccagtctaagtaaagttttgcacagcttacatgatactgtatgaatgtatgaaaaaaaaggagaaaaaaaagaaaaaaaaaggtcagggttagggatcttactgaactgtgaattttatttctgtttgggtccaattatctacagaaggagcatccatacatacaaatattattttgctgttcctctagttcgcttccatagtagataagttggtggccatttagatgtcttttatttctgcacttattgtaggaaattttaatatatttcattttagtaagctattgataaaatagtttttgactttgaaaattaaaatgtttatttagcttattgtagtatacttccaccagacaacaaaatagattatttttattgtattatgtatatatatatatgtaaagaaagaaaaaaagctaaaaatatctaattctttagttgccacttttccaattgatgtattattgtgcatgtaatattttcaaagatcaacacaggctaaaacaaaaacaatttatagatttttatatttttgtacaggtattttcaaactagcttcttcaaacttaacatgtgacttattcttctatagtttctagaattgagaaacattaacacatttagtttttaggtgctcttttttgctcatataaaacagcttcattagtcagtgttttaactgtgttcaagctttacctcttgatgagaaatttcttatgtcaaggcagcattataaaccttcccccacagatttttccatcctgtctctcttactgttttattctcaaatcttgtgctttgaactctgaaaactggtggcttaaaaactaaaaaaagaaaaaaagcatatttagcaaggaaaaaaataccaaaaatttcaggcatagctgctggaaaaattatctatttctccattacccactgtaggatttcttttttaattatactttgactataaagtgtcaaagtataatttgttcttttcttttactttgttaccccatttgtaagctatagcatatgaagctatatatatagcttgtgaaggtttgatctagaacacccagtaacaaatgaacaatgttgcttacctgcttctttgacatcttaaaaaagaaatccaaggaggattgtaaggattgtcttaccaccttagctgaactgtgatgcacaagatttttctatgtgtttggtggaaatgtacctggtttgtacattcacgctaaacagatgataagctcaagtctgatggtttaatagaatgtaagttcatcgtttaaagcttttcctttttaggttggagaaggcaaaacacaggcttgcaagttggaagtatatgaagtcttgacagagtgtgtctggtaaattgaaaagtgtttcaaactatggcagttttgcaatcaggtgaaaatcacctcatgatattcagctgataaggtttataaaattgcccctttctagctgctctgttaggaattctggtttttgatacttttttcctgtctgcaaaccagaatttgattttttggtcttgcatttcaaaaaaaaaaagactttgaatctgtttagtagattccatatctttgagtttcagtgttttatatgtactacttaagttaaatagttaaaagcttttaaatagttgagctttttaatgttgacactttattttgtacctatttatatatgtatgtatatcttagaaaagcactttgttaaaaaaaaattgcattttatatgattcctgccatttgctgctaaatctgggctggtcagaatgctgcagcgatacttgatctatataaaaacctggcagtaaaatgtagagtgaaagttaaatcctcttgctgttttaactttatcataaagatgacataggcaagctgtgcagctttacattttaaccaggggactctgtggcatttaaaaccgtctagaaatggttgtactttaatgccagtaataatctgcttcctctattgtcattaaaatatatacgtttagtgtatcacacaaaccaatcttataagggtaatgtaaaaaccccaacaattgtacatgttctgtttttgaaaattgtggcatgtatttttgggtgaagatcattagagaagagttctctaaaggttttctgtgttcatacatggtatacagatagctcataatgaagtccagaatcttacttttaagtgaaggcattgtgaattcacctcaagtaaacccattgttccaaagcaattataaactttgactctagtactactatgatttaaaaaanaaaaannccncaaaaaccttttttcctagtttcagatacactggattctttatagagtttgtctccatttgaaagcttgctgtccagtcgctcttgttaagatcttgtctgagttttgaattgggtgccacacttttccagtcaatataattgcttgttctactgtaccatgtatgattcttgtcctttcctatatccttcatgacagattatgatgtggctttatattgtgccttacttgtacatttaaaactaaacgtcttcattcccttccacttcctacatctttaactttgacctttttggtaagagaatcagaactattacaaaagcatcatgaaggatttcagatgggtatggtttcaaattccctctctttatagttattttatatttgtatgaaagaccagttttggatggtctttgaatataggggggaaagattagcagtaatttcactacatcccttttctctgactttcatgcatttctcatacatcttctttctgatgcttgactttatttgcttcctagcaatagtctgcatttaaagaaaggtgtgttcaattcatcagcttgaaattgactatttcatttttccaggattttttaggagaagagtacccattttgttttataaaaacagatgacaagtctctttaaaagaaacagaagtacagtacttttgaaatacaatgctgttagtttggatttctntttatatatatatataatattcatacaatgatctgatgtttgccttcattaataaagctgttagtttattcaccaaaatgtcaagaatggatgtgcttttctttattccacacatttaaaaaaatttagctgctaagatttaatgttataagaaatgaattcaagttgccttcagcaagaattaacaaaaacttatgttccctttctttatatagtttcctaaaattctgttcaagtattttctagttaattatgtaacagaatgttagcatctctccatatcttgaaacttgaattttgagaatgcattgaattatgctttcagtgttaaagtaaaaggtttcaattatccttctagtgaagtctgttgtggaataccatttcccatggaactgaggccatttccacaactttgcacagaactgcagtcttgttcttcccttggatcatgacaaataagtctcacacagtgccgtaatacttgtggattcttttgtaatctttgtaatcttaataagggcattatgagaagacgactccatgtttttttaatacttcaaacacattgggatgtaacaatgaatgtcaactgtaggaatggtggtttcgttttaaggaataagcatgttggggaaagatgatgaaaatgtactactgaaagttatacacttccataggcaaatgggattatgtgttgaagcatagtcctcatgcttaataaactgactgaaatcgtagaaattacacctaggaactgagctaggccaaattgccatttttgtttagagagttttggaggtagtagtgaggggacagagccttaaaactacttccaaacagtattttggaattgaagacttggtaactagtgaagaacatcaaagttgggtatttcaatgtgccaagtttgggtgaactaggttcggtttgcctctttcataacaatgtaaacacaatggtgtagttaattaaattctgggtggataggagcaggactgattactatgtcttgcccttcgccctttgtttttttcagaaccaaataacagaaatgtgtatgtgtgtactgtatctgcctttccaccacatttttatgacactgtattccactgcctgcttttttaccttctttccctaggatttgtcctacagcttagtattgtggttgacagcgatactagggctgacagcacagaagtcacaagagaagagtggaagggcaagaattcaaagcatttgttcatacaatgtggcaacctcttttgcatagttgcgtaggatcctgtttgtaatgctatcataaatattctgtagttttttttttttctctcccaactggagctatgacactttttattggattcagtcttgtctcttgtctagaaagaactttatcttgttgacgcatgagctgtttaaaaattatcctattaaatgttggttaatagttgtgcagtttttcatttcagatggaaaggcaatgcaaattttgcctttgttttctgtcaccttccaacccctgagcacttctagtcagatacagattcatcagtgtatgcaacatcctttgtaatttaaaataaaaaaagatgaaaagaaaacgttctgaattgtttgcctcatgttttcgcccttcctttctgtacttatatcttgcttacctaggtaaccatccgctcctcaagataacctattccaaagaaattccaaatcacagaga

SEQ ID NO: 457 - DNA, 3139 bp, Homo sapiens
  misc_feature: Incyte ID No: 346686.23
aggctccttcctgggaggaaggggctgcctgtgccctcgaaggcgcaagggagggcaggagggaggctcggaaggtgttgcaatccccagcccccgggcctgtcagaggctgagccattaacgacagagctcggggagagaagctggactgcagctggtttcaggaacttctcttgacgagaagagagaccaaggaggccaagcaggggctgggccagaggtgccaacatggggaaactgaggctcggctcggaaaggtgaagtaacttgtccaagatcacaaagctggtgaacatcaagttggtgctatggcaaggctgggaaactgcagcctgacttgggctgccctgatcatcctgctgctccccggaagtctggaggagtgcgggcacatcagtgtctcagcccccatcgtccacctgggggatcccatcacagcctcctgcatcatcaagcagaactgcagccatctggacccggagccacagattctgtggagactgggagcagagcttcagcccgggggcaggcagcagcgtctgtctgatgggacccaggaatctatcatcaccctgccccacctcaaccacactcaggcctttctctcctgctgcctgaactggggcaacagcctgcagatcctggaccaggttgagctgcgcgcaggctaccctccagccataccccacaacctctcctgcctcatgaacctcacaaccagcagcctcatctgccagtgggagccaggacctgagacccacctacccaccagcttcactctgaagagtttcaagagccggggcaactgtcagacccaaggggactccatcctggactgcgtgcccaaggacgggcagagccactgctgcatcccacgcaaacacctgctgttgtaccagaatatgggcatctgggtgcaggcagagaatgcgctggggaccagcatgtccccacaactgtgtcttgatcccatggatgttgtgaaactggagccccccatgctgcggaccatggaccccagccctgaagcggcccctccccaggcaggctgcctacagctgtgctgggagccatggcagccaggcctgcacataaatcagaagtgtgagctgcgccacaagccgcagcgtggagaagccagctgggcactggtgggccccctccccttggaggcccttcagtatgagctctgcgggctcctcccagccacggcctacaccctgcagatacgctgcatccgctggcccctgcctggccactggagcgactggagccccagcctggagctgagaactaccgaacgggcccccactgtcagactggacacatggtggcggcagaggcagctggaccccaggacagtgcagctgttctggaagccagtgcccctggaggaagacagcggacggatccaaggttatgtggtttcttggagaccctcaggccaggctggggccatcctgcccctctgcaacaccacagagctcagctgcaccttccacctgccttcagaagcccaggaggtggcccttgtggcctataactcagccgggacctctcgccccaccccggtggtcttctcagaaagcagaggcccagctctgaccagactccatgccatggcccgagaccctcacagcctctgggtaggctgggagccccccaatccatggcctcagggctatgtgattgagtggggcctgggcccccccagcgcgagcaatagcaacaagacctggaggatggaacagaatgggagagccacggggtttctgctgaaggagaacatcaggccctttcagctctatgagatcatcgtgactcccttgtaccaggacaccatgggaccctcccagcatgtctatgcctactctcaagaaatggctccctcccatgccccagagctgcatctaaagcacattggcaagacctgggcacagctggagtgggtgcctgagccccctgagctggggaagagcccccttacccactacaccatcttctggaccaacgctcagaaccagtccttctccgccatcctgaatgcctcctcccgtggctttgtcctccatggcctggagcccgccagtctgtatcacatccacctcatggctgccagccaggctggggccaccaacagtacagtcctcaccctgatgaccttgaccccagaggggtcggagctacacatcatcctgggcctgttcggcctcctgctgttgctcacctgcctctgtggaactgcctggctctgttgcagccccaacaggaagaatcccctctggccaagtgtcccagacccagctcacagcagcctgggctcctgggtgcccacaatcatggaggaggatgccttccagctgcccggccttggcacgccacccatcaccaagctcacagtgctggaggaggatgaaaagaagccggtgccctgggagtcccataacagctcagagacctgtggcctccccactctggtccagacctatgtgctccagggggacccaagagcagtttccacccagccccaatcccagtctggcaccagcgatcaggtcctttatgggcagctgctgggcagccccacaagcccagggccagggcactatctccgctgtgactccactcagcccctcttggcgggcctcacccccagccccaagtcctatgagaacctctggttccaggccagccccttggggaccctggtaaccccagccccaagccaggaggacgactgtgtctttgggccactgctcaacttccccctcctgcaggggatccgggtccatgggatggaggcgctggggagcttctagggcttcctggggttcccttcttgggcctgcctcttaaaggcctgagctagctggagaagaggggagggtccataagcccatgactaaaaactaccccagcccaggctctcaccatctccagtcaccagcatctccctctcctcccaatctccataggctgggcctcccaggcgatctgcatactttaaggaccagatcatgctccatccagccccacccaatggccttttgtgcttgtttcctataacttcagtattgtaaactagtttttggtttgcagtttttgttgttgtttatagacactcttgggtgtaaaaaaa

SEQ ID NO: 458 - DNA, 1934 bp, Homo sapiens
  misc_feature: Incyte ID No: 234568.25
gagcttcctcgggtactcggccactcggggcatcgcggcggcctttctagccgctgtcccaagggttggtctcgcgctttcggctgcgagctctctgtggtgctggcagcgacatgtggcgcctcccgggactcctgggccgagctcttccccgtacactgggacctagcctctggagggtgactcctaagtccaccagcccagatgggcctcagactacctcctccactttgctggttcctgtgcctaacctcgacaggtcaggtccccatggcccaggcacgagcgggggtccaaggtcccatggatggaaggatgccttccaatggatgtcttcccgtgtctccccgaacaccctatgggatgccatatcttggggcactctggccgtgctggccctgcagctggcaaggcagatccacttccaggcatccctgccagcaggacctcagcgggtagaacactgctcctggcacagtcccctggaccgtttcttctcatctcccttgtggcacccatgctcctcactgcgacaacacatcctccccagccccgatggcccagctcccaggcacactggcctcagggaacccaggcttggccaggaagaagcctcagctcagccccggaacttctcacacaactctttgagaggagctcgtcctcaggacccctctgaggaaggtcccggtgattttggcttcctgcatgccagtagtagcatcgagtccgaggcaaaaccagcccagcctcagcccactggtgaaaaggaacaagataaatcaaaaactctttcccttgaggaggctgtgacttccattcagcagctcttccagctcagtgtttccatcactttcaacttcctgggaacagagaacatgaagagtggcgaccacacggcagccttttcttacttccagaaagctgcagcccgcggctacagcaaagcgcagtacaatgcgggcttgtgtcatgagcatggcagaggcacccccagggacattagcaaggcggtcctttattatcagttggctgccagccagggccacagcctggctcagtaccgctatgccaggtgcctactacgagacccagcctcttcgtggaaccctgagcggcagagggcagtgtccttgctgaagcaggctgcagactcaggcttgagagaggcccaagctttcctcggggtgcttttcaccaaggagccctacctggatgagcagagagctgtgaaatatctttggcttgcagccaacaatggggactcacagagcaggtaccaccttggaatttgctatgagaaaggccttggtgtgcagaggaatctgggagaggccttgagatgttaccagcagtcagccgctctgggaaatgaggccgcccaggagaggctgcgagccctcttttccatgggggctgcagccccgggggcccagcgacctgacagttacaggactgaagtctttctccagcccctccctctgcagcttgaacaccctgctagcaggaacctcacgcctaccacatgcctcgagcacaggcaaccttggcctcctctgcagaagtgggcatctcggagccagcctggaagcctccagcagggctattcccccacacccctacccactggaaaggagtgttgtaagactaggttttggctaaggaagaagtttcttgcccaaatgcctggatgtgtctgcttgactttcagaacttctcacctcagccctaaagagggagcctgtgggttctcagagagatatcacaatttgagtcccaaagaagaggccagatacccacccaccttcccccaaatcttaagcacctgcgccagtacagtcaagaagaggaaagtgtgtgaagacccaggtctggctctgccacttgcctggccatgtcaccttgaagctgtgacctgactccctatatgtttc

SEQ ID NO: 459 - DNA, 3307 bp, Homo sapiens
  misc_feature: Incyte ID No: 234568.17
ggcattcagagcttctcgggtactcggcactcggggcatcgcggcggcctttctagccgctgtcccaagggttggtctcgcgctttcggctgcgagctctctgtggtgctggcagcgacatgtggcgcctcccgggactcctgggccgagctcttccccgtacactgggacctagcctctggagggtgactcctaagtccaccagcccagatgggcctcagactacctcctccactttgctggttcctgtgcctaacctcgacaggtcaggtccccatggcccaggcacgagcgggggtccaaggtcccatggatggaaggatgccttccaatggatgtcttcccgtgtctccccgaacaccctatgggatgccatatcttggggcactctggccgtgctggccctgcagctggcaaggcagatccacttccaggcatccctgccagcaggacctcagcgggtagaacactgctcctggcacagtcccctggaccgtttcttctcatctcccttgtggcacccatgctcctcactgcgacaacacatcctccccagccccgatggcccagctcccaggcacactggcctcagggaacccaggcttggccaggaagaagcctcagctcagccccggaacttctcacacaactctttgagaggagctcgtcctcaggacccctctgaggaaggtcccggtgattttggcttcctgcatgccagtagtagcatcgagtccgaggcaaaaccagcccagcctcagcccactggtgaaaaggaacaagataaatcaaaaactctttcccttgaggaggctgtgacttccattcagcagctcttccagctcagtgtttccatcgctttcaacttcctgggaacagagaacatgaagagtggcgaccacacggcagccttttcttacttccagaaagctgcagcccgcggctacagcaaagcgcagtacaatgcgggcttgtgtcatgagcatggcagaggcacccccagggacattagcaaggcggtcctttattatcagttggctgccagccagggccaccagcctggctcagtaccgctatgccaggtgcctactacgagacccagcctcttcgtggaaccctgagcggcagagggcagtgtccttgctgaagcaggctgcagactcaggcttgagagaggcccaagctttcctcggggtgcttttcaccaaggagccctacctggatgagcagagagctgtgaaatatctttggcttgcagccaacaatggggactcacagagcaggtaccaccttggaatttgctatgagaaaggccttggtgtgcagaggaatctgggagaggccttgagatgttaccagcagtcagccgctctgggaaatgaggccgcccaggagaggctgcgagccctcttttccatgggggctgcagccccggggcccagcgacctgacagttacaggactgaagtctttctccagcccctccctctgcagcttgaacaccctgctagcaggaacctcacgcctaccacatgcctcgagcacagggcaaccttggcctcctctgcagaagtgggcatctcggagccagcctggaagcctccagcagggctattcccccacacccctacccactggaaaggagtgttgtaagactaggttttggctaaggtgagataaaacatagtccctggtgcctcttaggggccagagcgggcaggaggttggataacaaaaatagagcatcagcaaccctttccaggtagaaattccagcgggagttcaggttcccaagcaatttcacgtacatggctggtaagtgactgatctttccccccgcttggtagcctcacagatgagtcttggatgcattcacagtcatttctggtctgtgcaccaaaggatgcattcagtgacctatgaaaaaccctactgaagggtccagagaccctggtgctcaccttagcctttgtctttgagcaaataacttaccttcttccttcttatgcctgggttttctcacacttaaatctgtactactgtttgccaatgtctgatgtgtgtatccctggttcacaagaagattttagatggtattcaaattaatattttctatttagttatatatttaatgtataatataaaaatatgattagcatattgacctgtagtttgatagatgttctgtctaggataaagctaactgtaaaaaaaaatagtgaatcagtttaaagaaaaacataacgtaaaagtgggcacagatccagagaggtagcaaaaatcacaggggtggttccatgaatggctgacacttaggaaactctgaattaggccatcctcgagactagcccaccattcacctctgttcatcccccgtgggctcataatcgttttcatttcacctttgatttggaaggaagaagtttcttgcccaaatgcctggatgtgtctgcttgactttcagaacttctcacctcagccctaaagagggagcctgtgggttctcagagagatatcacaatttgagtcccaaagaagaggccagatacccacccaccttcccccaaatcttaagcacctgcgccagtacagtcaagaagaggaaagtgtgtgaagacccaggtctggctctgccacttgcctggccatgtcaccttgaagctgtgacctgactccctatattgtttcctcagttgtagaccaaaggcaatggtgtctgccctcctaccttagaagacaaatgcaagggcatttcaccacagagaggacctttgtgctcactttggcccaggaggcagtgatgctcatggttgcatgactttatgagtcgctgggccagggtgaggacctgggcctcctgactcctggcccagagttcttgtccatcagttcatactgcaattttatgtgaaagcattatgactgtcctacccatgggagagtaaatgtagattgaatgctaggagtcttaaagctggagagtatagattttgaggtccccatttgggaaacatgtgccagaaatgtctaggtgtttaataaaacagatattggattatctcatcactcttgcccttgagtattatgggaagagccagggagacgggcagggggagctgaaagctgaggctccgtcctcatctctaaactctccactaaccaatttaaaggatcttaaaagcttctccaggagagagacttaggaaaaaaaaagatttctgagtcagggctaatgagtccagttactgaatttgtgaatagctattccctgggttctggatgttagcccaagttgaatagcctagatg

SEQ ID NO: 460 - DNA, 2441 bp, Homo sapiens
  misc_feature: Incyte ID No: 978276.1c
  unsure 1333-1356: a, t, c, g, or other
attttctccattttatttgtcaatataaaaatactcaaatatttacaacaaataaatacgcggggacacaataagttacactgttaggagccctcctcctagggctggaagagagtatgccattgtccacagcaggcccaccctctcccttctctcccctcacacagcctttcccagccctgtacaggaagaaggcaagtataaaataccactgaaccccggggccaagtgggaggccccacccacccttccccccaaacacacaggaggctccatctccctccccccaccctgaaaacattcacagccctaggagcaggactaggcccaccccaagccctgcactccctctgaaggggcacagcaccctgtccaccccacctccatatgtacatcgctgcccgacactcggggcagtgggggtaggagagacaaagtgatacgaccccttccccttcatagctccaatgactcaccaggaggacccaggccaagggaagacttgacagaaacaggaaggctatgccacaagcgcgcacgcgcgtgcacacacacatacaacacacacaaacacatgtgcaaatacagacaaacacacatcttgaaacttctgccttgaaaagttttggcggctggggtcccgcgtgtctgtgattcacagagaggaggaagatgccttctgcgaggctggtgccctggtgagccacaccaagtggcagtgcccgtgctgagcagagcaggtcctcatggccgggtgggtgctgggcagtatctgtcccagacagagcaggtgcccgtgccatgtccctgaggtagctggtgcctgtgcaaaagtaggagctacacctcccacgcttcccgccgacgcggtgggggttcccctcatactgatgactcctcggggttggagtcgggcagtggctggcgttgctgcagtttgcgtctcagttcatccgcgagctcaggcagggggtgcccgagccctccccggtcctcccctcctagttgtaagcgcacgtaaccattggcatttgagttccgcccaccccccaggtgaagccgagttggagaaggcagaggctggcctgggatgcctggaggtggcgaagggggccccccaccgggctggcaccgggcatgcccaggtactatcttaagggagccatctgaatagtagtaaccgacaggatcccaaagtttctcatctggttcaggacagggccggaaggggggactggtgggctccttgggcagctccagggggtacaccaaggtcctctcagtagccttggcccctttctccagctcttcccgcagccgccggcgcaatgannnnnnnnnnnnnnnnnnnnnnnngcacacagcccccagggccaccaccgccagccacaccagccccaggttttccaggggggcccgggcctccaaggtcaccgacgggcctgccacgacagccacaaggtagccttcagcagccagccgcgccccctgctcctctgaaaagcagtggtaggccccggcatggcggggctgggcagccatcacaaccagggcctggagccgggcatcgtagaggaaggacccgggctgttccgcaggcaggtcccggcccccaaaggtccagcgggcatgggccaagttggaggagaggtggcagggcagcaccaggtctgtgcccgccaccaccgtgatgtttttgggagtgggcctgactttcttactgccacggaggttgcagatgcctgaagtgtccgaggtcatcacatgctggatcagtagagatcccagagtggccacccacggccacacagcggctggtgttgacgctccaggcgcaataggggtcccgggcgaggacacagtctgcacaggagcgatacttcatgcagtcggccacgggcagctgcaccagctgagagcgggagccggcaaagagcagcttctgcgagaaaagcggggcgcaggaggggggtcggccagggccacaccacgggaggggcggccggaccagaacgcagcatggggacagcttggactcctgcagggggcacagcacggggcgccagaaggaggaacaagggaacaaggcagagctatagtgctgaaaagggaactctaagaaccgcagaactcagagggcttacacaggccagatgcaatcctaagccccttatcgacgtgacgttattagaaagggatgatggggctgtgaggccaaaaagtataatcacacacactcacacacacatagtgcaggaaatacatttcaaggcccatcagccctcacaacagcagcagcataacataagatgttttcctgtttcaacggtggatgccaatctgtgtgtttattcaaccacacactttctttctgccattattccatgttctaggggacaattttgagtcataatagctggtaaaaggcaaacaaatcaaag

SEQ ID NO: 461 - DNA, 468 bp, Homo sapiens
  misc_feature: Incyte ID No: 026968.1
  unsure 194-224, 347-401: a, t, c, g, or other
agcagtttggtccgggaatgaatcctttcattcagcaaacaaatgccatgccagctgagtcctgaaagagctcatgggcacgtaaaggaatatagttgttttacaacatgtcccccaaaattatttgacactcttctcattagcaagtgggactctgccccttccacttggatctgagctctgtaactgcctgnnnnnnnnnnnnnnnnnnnnnnnnnnnnnnnatcagtttctgggcccagaccttaagaacctagcagcgtccacttcctgtctccttgtatgctcactcttggaacccagctaccatgctgtgatgaagcctaaagacccaagcagagaggaannnnnnnnnnnnnnnnnnnnnnnnnnnnnnnnnnnnnnnnnnnnnnnnnnnnnnngaggagctgccccagttaatgctacatgaaacagggacaagtcatcagtcatccatccccactgtgg

SEQ ID NO: 462 - DNA, 1553 bp, Homo sapiens
  misc_feature: Incyte ID No: 243103.24
gcggcggtggagagcgcagcgcggcagcccggtgcagccctggctttcccctcgctgcgcgcccgcgccccctttcgcgtccgcaaccagaagcccagtgcggcgccaggagccggacccgcgcccgcaccgctcccgggaccgcgaccccggccgcccagagatgaccgcgaccgaagccctcctgcgcgtcctcttgctcctgctggctttcggccacagcacctatggggctgaatgcttcccggcctgcaacccccaaaatggattctgcgaggatgacaatgtttgcaggtgccagcctggctggcagggtcccctttgtgaccagtgcgtgacctctcccggctgccttcacggactctgtggagaacccgggcagtgcatttgcaccgacggctgggacggggagctctgtgatagagatgttcgggcctgctcctcggccccctgtgccaacaacgggacctgcgtgagcctggacgatggcctctatgaatgctcctgtgcccccgggtactcgggaaaggactgccagaaaaaggacgggccctgtgtgatcaacggctccccctgccagcacggaggcacctgcgtggatgatgagggccgggcctcccatgcctcctgcctgtgcccccctggcttctcaggcaatttctgcgagatcgtggccaacagctgcacccccaacccatgcgagaacgacggcgtctgcactgacattgggggcgacttccgctgccggtgcccagccggcttcatcgacaagacctgcagccgcccggtgaccaactgcgccagcagcccgtgccagaacgggggcacctgcctgcagcacacccaggtgagctacgagtgtctgtgcaagcccgagttcacaggtctcacctgtgtcaagaagcgcgcgctgagcccccagcaggtcacccgtctgcccagcggctatgggctggcctaccgcctgacccctggggtgcacgagctgccggtgcagcagccggagcaccgcatcctgaaggtgtccatgaaagagctcaacaagaaaacccctctcctcaccgagggccaggccatctgcttcaccatcctgggcgtgctcaccagcctggtggtgctgggcactgtgggtatcgtcttcctcaacaagtgcgagacctgggtgtccaacctgcgctacaaccacatgctgcggaagaagaagaacctgctgcttcagtacaacagcggggaggacctggccgtcaacatcatcttccccgagaagatcgacatgaccaccttcagcaaggaggccggcgacgaggagatctaagcagcgttcccacagccccctctagattcttggagttccgcagagcttactatacgcggtctgtcctaatctttgtggtgttcgctatctcttgtgtcaaatctggtgaacgctacgcttacatatattgtctttgtgctgctgtgtgacaaacgcaatgcaaaaacaatcctctttctctctcttaatgcatgatacagaataataataagaatttcatctttaaatgagaaaaaaa

SEQ ID NO: 463 - DNA, 6300 bp, Homo sapiens
  misc_feature: Incyte ID No: 469883.1
  unsure 307, 3877: a, t, c, g, or other
ggaaggaagctgggcagccagccggccatgtgtgtctgccgggtgccccacaccaggtcccctccatgtgtctgtcctgtgttctgggctggtagctggaggagcgggaagcactgactcctgaagaccctggcttcgctttcctgtgtccgttgggctgtccacttctaagactctctttgtcccccgctgccttccgtattcctcagcagatggacccgggtgaggatccagggcaagcagaggggctacagagcagtgagaagcaggtcatcactcaccatgggtcctgccttttctttctcangtccttccagcatttcttctgaggccctgaagaagtatcaagtgggctttgacattgcggtggtgagagcgacccctcctcacctggagaactgggaaatgtggattctcagggaccgcgctgttcacgagctccaggctgtgctgctggccctggtcctggggcgctgagccgcatctgcaatagcacacttgcccggccacctgctgccgtgagcctttgctgctgaagcccctggggtcgcctctacctgatgaggatgtgcacccccattagggggctgctcatggcccttgcagtgatgtttgggacagcgatggcatttgcacccataccccggatcacctgggagcacagagaggtgcacctggtgcagtttcatgagccagacatctacaactactcagccttgctgctgagcgaggacaaggacaccttgtacataggtgcccgggaggcggtcttcgctgtgaacgcactcaacatctccgagaagcagcatgaggtgtattggaaggtctcagaagacaaaaaagcaaaatgtgcagaaaaggggaaatcaaaacagacagagtgcctcaactacatccgggtgctgcagccactcagcgccacttccctttacgtgtgtgggaccaacgcattccagccggcctgtgaccacctgaacttaacatcctttaagtttctggggaaaaatgaagatggcaaaggaagatgtccctttgacccagcacacagctacacatccgtcatggttgatggagaactttattcggggacgtcgtataattttttgggaagtgaacccatcatctcccgaaattcttcccacagtcctctgaggacagaatatgcaatcccttggctgaacgagcctagtttcgtgtttgctgacgtgatccgaaaaagcccagacagccccgacggcgaggatgacagggtctacttcttcttcacggaggtgtctgtggagtatgagtttgtgttcagggtgctgatcccacggatagcaagagtgtgcaagggggaccagggcggcctgaggaccttgcagaagaaatggacctccttcctgaaagcccgactcatctgctcccggccagacagcggcttggtcttcaatgtgctgcgggatgtcttcgtgctcaggtccccgggcctgaaggtgcctgtgttctatgcactcttcaccccacagctgaacaacgtggggctgtcggcagtgtgcgcctacaacctgtccacagccgaggaggtcttctcccacgggaagtacatgcagagcaccacagtggagcagtcccacaccaagtgggtgcgctataatggcccggtacccaagccgcggcctggagcgtgcatcgacagcgaggcacgggccgccaactacaccagctccttgaatttgccagacaagacgctgcagttcgttaaagaccaccctttgatggatgactcggtaaccccaatagacaacaggcccaggttaatcaagaaagatgtgaactacacccagatcgtggtggaccggacccaggccctggatgggactgtctatgatgtcatgtttgtcagcacagaccggggagctctgcacaaagccatcagcctcgagcacgctgttcacatcatcgaggagacccagctcttccaggactttgagccagtccagaccctgctgctgtcttcaaagaagggcaacaggtttgtctatgctggctctaactcgggcgtggtccaggccccgctggccttctgtgggaagcacggcacctgcgaggactgtgtgctggcgcgggacccctactgcgcctggagcccgcccacagcgacctgcgtggctctgcaccagaccgagagccccagcaggggtttgattcaggagatgagcggcgatgcttctgtgtgcccggataaaagtaaaggaagttaccggcagcattttttcaagcacggtggcacagcggaactgaaatgctcccaaaaatccaacctggcccgggtcttttggaagttccagaatggcgtgttgaaggccgagagccccaagtacggtcttatgggcagaaaaaacttgctcatcttcaacttgtcagaaggagacagtggggtgtaccagtgcctgtcagaggagagggttaagaacaaaacggtcttccaagtggtcgccaagcacgtcctggaagtgaaggtggttccaaagcccgtagtggcccccaccttgtcagttgttcagacagaaggtagtaggattgccaccaaagtgttggtggcatccacccaagggtcttctcccccaaccccagccgtgcaggccacctcctccggggccatcacccttcctcccaagcctgcgcccaccggcacatcctgcgaaccaaagatcgtcatcaacacggtcccccagctccactcggagaaaaccatgtatcttaagtccagcgacaaccgcctcctcatgtccctcttcctcttcttctttgttctcttcctctgcctctttttctacaactgctataagggatacctgcccagacagtgcttgaaattccgctcggccctactaattgggaagaagaagcccaagtcagatttctgtgaccgtgagcagagcctgaaggagacgttagtagagccagggagcttctcccagcagaatggggagcaccccaagccagccctggacaccggctatgagaccgagcaagacaccatcaccagcaaagtccccacggatagggaggactcacagaggatcgacgacctttctgccagggacaagccctttgacgtcaagtgtgagctgaagttcgctgactcagacgcagatggagactgaggccggctgtgcatccccgctggtgcctcggctgcgacgtgtccaggcgtggagagttttgtgtttctcctgttcagtatccgagtctcgtgcagtgctgcgtaggttagcccgcatcgtgcagacaacctcagtcctcttgtctattttctcttgggttgagcctgtgacttggtttctctttgtccttttggaaaaatgacaagcattgcatcccagtcttgtgttccgaagtcagtcggagtacttgaagaaggcccacgggcggcacggagttcctgagccctttctgtagtgggggaaaggtggctggacctctgttggctgagaagagcatcccttcagcttcccctccccgtagcagccactaaaagattatttaattccagattggaaatgacattttagtttatcagattggtaacttatcgcctgttgtccagattggcacgaaccttttcttccacttaattatttttttaggattttgctttgattgtgtttatgtcatgggtcatttttttttagttacagaagcagttgtgttaatatttagaagaagatgtatatcttccagattttgttatatatttggcataaaatacggcttacgttgcttaagattctcagggataaacttccttttgctaaatgcattctttctgcttttagaaatgtagacataaacactccccggagcccactcaccttttttctttttctttttnttgtgacaactttattccttgagggaagcattgtttttggagagattttctttctgtacttcgttttacttttctttttttttaacttttactctctcgaagaagaggaccttcccacatccacgaggtgggttttgagcaagggaaggtagcctggatgagctgagtggagccaggctggcccagagctgagatgggagtgcggtacaatctggagcccacagctgtcggtcagaacctcctgtgagacagatggaaccttcacaagggcgcctttggttctctgaacatctcctttctcttcttgcttcaattgcttacccactgcctgcccagactttctatccagcctcactgagctgcccactactggaagggaactgggcctcggtggccggggccgcgagctgtgaccacagcaccctcaagcatacggcgctgttcctgccactgtcctgaagatgtgaatgggtggtacgatttcaacactggttaatttcacactccatctccccgctttgtaaatacccatcgggaagagactttttttccatggtgaagagcaataaactctggatgtttgtgcgcgtgtgtggacagtcttatcttccagcatgataggatttgaccattttggtgtaaacatttgtgttttataagatttaccttgtttttatttttctactttgaattgtatacatttggaaagtacccaaataaatgagaagcttctatccttgatttggggaagacattccttagcggaggctgtgcagcctcccgcccctgcatggcccaggcgggacagctgggctcgctcttttctgtccgtttcctgctgtgttttgccctctctggcctgtgacgtgctcctggcgacttcttcctcagtgccctctcttttctgtcctctctgtctcacagcctcgtctcctaagcccctccctcctcctggctcctcttccctgtcctgtctgggccatgtgggggacaggaggctttcctctccctggaccccctggccagcctcgggtgcggggcccgacagcagctcgagggtctccttgctgccgcccttcctgagtgaccaggcacagcacgtgcacgccctggggaacttctacctcttctgccaggccacaggtcctgcagacattcgctttgtctgggagaagaatgggcgagctctggagacctgtgtccctgtgcagacccatgcactgcctgatggcagggcccatgcactcagctggctgcaggacgccatcagggaaagcgctgagtatcgctgctctgtcctctcctcagcagggaacaagacttcgaaggtgcaggttgctgtgatgagacctgaagtgacccaccaggagaggtggaccagagagctctctgcctggagggctgtggctggggagcacgaccggatgatgcagagctggaggaaggcgtgggaaagctgtagcaaggacaccctgtagccaccaggaaggagtccctgacaccgacctcaaccccaacaagaccctgctgccactgaccacagccacccccggagaaggcctggtcccccacaactgtgaactgtcttgcccaagcctgctctgaacacagccattgggccaccacctgatgggcagaggcgggacagtggagaagcctggaacccaagtgggcctgtgacaggaactaagacttaaaaaattaggtgcttacctgggacagtaagttctgtctggcacaagcaggtaaccaggatggctaacaggctttgatagctgctcgtgaactaaaacagcagggtgtgtgcaggttcctcctctacggtcaggcagcaggctctgaaggctgatcctacaccgtcccagtgactccccttgacagagtgcccccaccccctaatagccaacagggttagcatggccagcacagatcgctgcttttattgatgcaaatcaagcctgctgcttctcctccctgcagacttagccaaggaactccaagatgcatgactgggacaagaaaaggtgagactccacatggaaatgccttgccctaaaccttgaatgactgtgagatgcgatctgggagtgcatctgtcaagtctttgtgttttcttcactaacctcagaatactgggctctattttatcaagcgctgcagtttatgcctctgtcccgtcaatgctcagcttctgcaacaggacaccaaacttgatgcagaaagccaaataggtcaattatgcaaatctcctggtgccatattaaatttcttgacgatggaatgagtctcatgagtgttttgttctacctgctttcaagtctctaattattaaagctgtatctctgaagactgtgtcactgtgtgtgtgaacttgtcctaaagctactcagcctttaatcttacacacacgtctcttcttgtct

SEQ ID NO: 464 - DNA, 4027 bp, Homo sapiens
  misc_feature: Incyte ID No: 903565.14c
  unsure 1276-1296, 2969: a, t, c, g, or other
gccatgggatgttaactcttttattaatttagggttaacattgtacttgcttcattgatttctctttcagagttgtagattcaataaacaacatctgggttctctccagctcacaggtgacaaggcaaatgcactgtcgtcaaacaggggagcaggacaatatggagaaagacgaggtcgaaaaaatttaaggcaaatgttacttccctattcaagggaattgatcaagcagatctgtgcatttcaatgaaaatatatgaaatatttgtcaaaataattaacatcggtaaaaattagaacatgtagcttataaaatgcctacacaggtttggcagaataaatccaactgtgtcatgtaggcttgtaatatacacagacacaggagtttccaccttaaaaacgagtcttctgaagggcagaggccaaatgtattttaaaagcaattccataaaatgggaagtgatggatgattaacaatgcatggctggctttacattttgttcagaggaattgcttggccatcggggtaccttttggctggccacagaatgcctcctgttgcctctcctcagaaggctctgcatcaggtcgaggtggtcgttcaggccatgagactcctgaagacacagacagaacacggtaacaaggagagctcggcttgctcaaaggagagcgctgcgggggatagaatcttctggtctggctttggaattggactttctaagccactgctgcagtttcagaagtagctgactatgtagaaatagatactccggccccagtggtcatatattttatgccctcaaacctatcttatttatagtctgaccaaaccgtccccagactgctcagtggcaggcaacgagcaggtagactgctggccctttgtcacatgtgaggatggcccagggttcgccagctgggccggggagatttactacacagccgcagaaaagcacggggagaagagtgatgtgtgatgccaagcgcctttcttttctgctttggtcttgaagattcagtaaacttatggtcccagaagctgctccaaagccagagctgtggattcccagaattcattttgttcctgttagtttgtcggaagactggagccaacaagcagcatttgagaggatatcaccattttaggaacacctccttaagagccaccacccacctggcttgggtgctcagagatgctgctcctggggagataaagctgtcaggtgcagggcgccgctcctgaaacagactctggccgacagtctggaggaannnnnnnnnnnnnnnnnnnnngagtgcctgccctctgtgggcagctaggcacccttacccggccaggaggcacgtgcggcagcagaactgaatgaagagcttccgttcgcacagccggttggacttcaccatctcgcagaatgtctcgtcagcgttgctgcacgtgtggttggtgatgcaggaggtccccagctgtgtgaagcccgtcttacacctgctacagttcctgctggagcctgcacagctcaagcagttctcgtcacaccttcgacacactttgtggggcaagcccggcatctcttctgggtagaagccctcaccacaggctggcacacacttccagtcgtggaagtggaagtttttcgcacagtgaatgcactcttctctgcctggccccacgcaggttccgcaggtgtgatggcattccccacatctgatcagctctgagtcaaagtaggtgcctggctcacagtcaggaatgcagctgccccgtgcaaggctgaatccttctttacagacagtacatttctcaggttcatccacgcactttttacagcttgggtggcatttaaggcaatttttctgactttcatcagcataaaatcctgcaggacagagggtcacacaggtgttcatctcctggtggtgatagaacccgcggcggcaagacaggcactgcgtcgcagctctgctggagcaggtctcacaccccttgtggcaccggcgacagcgtcttgctgctgtgtccccaaagtagcccaaggggcacacactcacgcacttcctgctggtcttgacactccccaggctgaagtggacgcagttcaagcactggtctgcattggggccatcacagcctttgtcaccacactccggatggcacacacctgtgtaatcttcctcatcttcaggaacttccacctgggagggtgacagggcagccttgggtggctccagctctggggctgagagctccagcatccgcgcagcgggactgatgggcactgaaggtgtggtacgggtgctctgctgtgccatacagtatgaggctccattctttcaacttccctgcttctccgggttgcggacctgggatggcagatcttggatttccaaggtccactgcccttcagccttttctccccagcagtggacagtcatgaattcccagtttgtaaacccttcattggaaagatccagcaacctctttgccagaattgagacttggttcccgagggagaaaccaggtagatctggaggtctcctcggcgtgggtgtgagatggaggtgcgaaccaccacgtgctccaagtagaccacccgctggtccgagtgctccgcgcaggcgctggtcagggccgtagtccgcagcacctgcactaaggggatgctcctgggtctcttgtccgaggcggccacacacatgtgctgcgatggcactgctgtccacttctttgcctccacaacgagagcttctgcgtccaccaaaccaaatccatagaaatggctaactttatgacccgcgccgtttactttccagtcgctcgctttcaggtgggccggccgggatgtcttcactagcaggtgctggacgtccctccaggttaactggctgtttgcttctagagccaaggcgatgatgcccgccaccatgggggcagagactgaggtcccagtgtggccatcggtacagcntgacgcagatccgtggtgacgatttttcgctcataaaaggccccactgctgtaggtggtggccagggtggaggcacactcttccaggtaccagggcttgtagccattctcggtggcgctgctgtacggagatggtgtagatgctgttggtgtagccatcgcacgagcagtagtccccctctctcccgccattcccagatgcccagacgaaaatggagcccaggccctgccggccctttttaatgccatactcgaaagcctgcttagccagtcggccgggcccgtccaccgtcttgccgtcgtcgtccggcccccagctggcactgtaaatgtcgatgtagttgggtctgatgcccagcgactttgcctcgaccacatctgtgacatcgccgtccagcatgcggatgcctcctattttggcattgtacgctatgcccacgatgcagtaggaattgtttgctgaagcagcaacttctcccgcacaacgagtgccgtgtttattttcattgctggcatcatatcgtggagatgggtcataatcattgccgttcacgtcgtagctggcgtaggaatcataatttggggccaggtcagggtgatttctctctatgccatcatcaaggatggtgaccaccacgttttttcctgtgtagcccctcttccacgctgcctggacattcatttccgaccggcagcgactgttcttgtcgccacaatgcaggtaccacatgttggaccaaatggggtcgttgaagtaaagggcctgcgggtcacttcgcacctgtctcttcacccttcgtttcacttcctgttgctggagccatttcacctgggggtccattctgaggaaggtgtgagggcctctgctactcaaggttgatcttttaaaggttttgctgtgataaaaatggtagtaatcttccaggtttccaatctggcccaagttgaggtagccgtgcgccgccgccacgcggtccgcctcggccgggccgcccagcacttgcaccgcccagtggttggtgtagacggggcgcggcgggggcgcggagcaggcggcag

SEQ ID NO: 465 - DNA, 4641 bp, Homo sapiens
  misc_feature: Incyte ID No: 227932.2
  unsure 4355, 4357, 4601, 4605, 4618: a, t, c, g, or other
gtgatgaattcatcagagaagatatgaaatataaagatgctactaataaacacagccatctgcacagagaagataaacatataacgattgaggatttatggaaacgatggaaaacatcagaagttcataattggacccttgaagacactcttcagtggttgatagagtttgttgaactaccccaatatgagaagaattttagagacaacaatgtcaaaggaacgacacttcccaggatagcagtgcacgaaccttcatttatgatctcccagttgaaaatcagtgaccggagtcacagacaaaaacttcagctcaaggcattggatgtggttttgtttggacctctaacacgcccacctcataactggatgaaagattttatcctcacagtttctatagtaattggtgttggaggctgctggtttgcttatacgcagaataagacatcaaaagaacatgttgcaaaaatgatgaaagatttagagagcttacaaactgcagagcaaagtctaatggacttacaagagaggcttgaaaaggcacaggaagaaaacagaaatgttgctgtagaaaagcaaaatttagagcgcaaaatgatggatgaaatcaattatgcaaaggaggaggcttgtcggctgagagagctaagggagggagctgaatgtgaattgagtagacgtcagtatgcagaacaggaattggaacaggttcgcatggctctgaaaaaggccgaaaaagaatttgaactgagaagcagttggtctgttccagatgcacttcagaaatggcttcagttaacacatgaagtagaagtgcaatactacaatattaaaagacaaaacgctgaaatgcagctagctattgctaaagatgaggcagaaaaaattaaaaagaagagaagcacagtctttgggactctgcacgttgcacacagctcctccctagatgaggtagaccacaaaattctggaagcaaagaaagctctctctgagttgacaacttgtttacgagaacgactttttcgctggcaacaaattgagaagatctgtggctttcagatagcccataactcaggactccccagcctgacctcttccctttattctgatcacagctgggtggtgatgcccagagtctccattccaccctatccaattgctggaggagttgatgacttagatgaagacacacccccaatagtgtcacaatttcccgggaccatggctaaacctcctggatcattagccagaagcagcagcctgtgccgttcacgccgcagcattgtgccgtcctcgcctcagcctcagcgagctcagcttgctccacacgccccccacccgtcacaccctcggcaccctcaccacccgcaacacacaccacactccttgccttcccctgatccagatatcctctcagtgtcaagttgccctgcgctttatcgaaatgaagaggaggaagaggccatttacttctctgctgaaaagcaatgggaagtgccagacacagcttcagaatgtgactccttaaattcttccattggaaggaaacagtctcctcctttaagcctcgagatataccaaacattatctccgcgaaagatatcaagagatgaggtgtccctagaggattcctcccgaggggattcgcctgtaactgtggatgtgtcttggggttctcccgactgtgtaggtctgacagaaactaagagtatgatcttcagtcctgcaagcaaagtgtacaatggcattttggagaaatcctgtagcatgaaccagctttccagtggcatcccggtgcctaaacctcgccacacatcatgttcctcagctggcaacgacagtaaaccagttcaggaagccccaagtgttgccagaataagcagcatcccacatgacctttgtcataatggagagaaaagcaaaaagccatcaaaaatcaaaagcctttttaagaagaaatctaagtgaactggctgacttgatggaatcatgttcaagtggcatctgtaaactattatcccccaccctccactccccaccttttttttggtttaattttaggaatgtaactccattggggctttccaggccggatgccatagtggaacatccagaagggcaactgtctactgtctgcttatttaagtgactatatataatcaattcatcaagccagttattactgaaaaatcattgaaatgagacagtttacagtcatttctgcctatttatttctgctttgttctcagtgatgtatatgcaacattttgttgaaagccacgatggacttacaagctttaatggactcgtaagccagcatgggcttgcaaaaatttcttgtttaccagagcatcttcttatctttccacagagctatttacatcctggactatataacttaaaagaagtaaaacgtaattgcactactgttttccagactggaaaaaaaaaaaaatctctgcaagtgaaactgtatagagtttataaaatgactatggataggggactgttttcacttttagatcaaaatgggtttttaagtagaacctagggtttctaattgacttgatttctggaaatgaaaacccgcgcttttattatgggaagcttcttgaactgcatttactattgtgaagtttcaagtcccgctgtaaagatcatgttgttttgttttccccagggctttcactgtgatttactgcattgcaggctgtatgataaaacacacataatttaaagagagaaggctcttgattccttatgcaagtggaagagttgaaacttgattgaaggacttaaaacattcacaaccttaagccgaggtggggggatatggggattcaggcaattgtttacacactttgaataactgcaaaggatttacggtttgtgaaaaatgtgtactgtggaaaagataataaattgaagacattattgtgtgggattgtgctgatttttgttgataacacaaaaaacactatgttttctggagagctgtgtaagctgtcttgttgcttagttgcaatataagaaatagtgatgttttggacgtaagttgtcaacaaatttctattttatattgttatatttttatgtagtttgaaatgtaaaaatgttctaatatcaagattaacaaatataaatttatggtgcatttagattgcgttgtattaatttataaagtatggtgttcattaaattggtgggttgtataagggtagcttttgttgttaaaaaaacagtagagagttaagttccatatagcaacaaagtatgttaacatctagggagtttctgcttataccactttaaaaatatgcaatcataagtgatttggttactgcaatgcagatggatgtttggatgaacaactgatacattttagttagaatgctttttcagcattatggctaaaatatatgtctaacccagtgctatttaggtgaaaatgctaattgataaaccagaagtttcttttgagatttgctttaaagaaatgctttagtaagaatatgaacaatttcctgatgtctcctataaattgtgattgtttattctattactattgttaaaaacttgaatggtatttatattggctgatatttatatacttaatagattgagttctgtaagggcaaaaacggattgaaatgaacatagcgttttgcactaatgataagataacctgagaggtagggttgaggaacacagggttgaaagctgttggagaggggaaaagttgtgcataaagaactgaaaagggttctggagtgttcattcagagtgaagggaaaactttatccttctatttcttataaccagacaggaggagttcttccctttgaaaattgcaaaaggaatgagaactttgcagttggatgaatagagaagggaaaagttgctggagcacggagtgaagatgggaggagctgttagcaaggcccactgctgctcctgggtgagaagggagctctggagcaggaccagctgggggccggcactgctgcttagagtggaggaggctggccaaagagactgtgggctgttttcagtcagggagcatgtgcattgtttgtgctcaatttcagacactcatttataaacaaattcaaccaagggatatttactgctttatgttgcttatgataattattttgcattaatacagtatacacatttgtaaattcaacaggaaattattgagttttggaaagctacagtaatttctgtattacatcatttatatgtgaaaagttggacatttctgtaagtttttaaaattatccatttgttactttaacattttaaaattatggtgttttcctgattttaaaagcaatattttccttactgtananacaaaaaacaaaagatcgatgatagaaaagtataaagaagaaaatagcaagcaggtcaaatactactatccaaaatgatcacttttaatattttagtatgctttctgctagatctttttctacatattgaagtatattttacataattgaaatcatactatatattcaattttatatcatgctttttcacttaatataagcattatcccaacatcattaaaacttcatgagcaacattttaatnactntataataatatgntgttgtataaatttaccataatc

SEQ ID NO: 466 - DNA, 4460 bp, Homo sapiens
  misc_feature: Incyte ID No: 903691.6
  unsure 3134-3282: a, t, c, g, or other
cactctgccagtaagtcagctgaggccgagaggagggagagaggacctcagaggccagactgtgagctagtctgccctgctcctgcgtgtgaggggtcgttggcagggcttagggaaggagaccttgatttggtatagtgggaacatttgctttggagacagatgaactggattctgatcgtgaccctgctattttctccttgtgtgactttggagccatgagaccccagatcctgctgctcctggccctgctgaccctaggcctggctgcacaacaccaagacaaagtgccctgtaagatggtggacaagaaggtctcgtgccaggttctgggcctgctccaggtcccctcggtgctcccgccagacactgagacccttgatctatctgggaaccagctgcggagtatcctggcctcacccctgggcttctacacggcacttcgtcacctggacctgagcaccaatgagatcagcttcctccagccaggagccttccaggccctgacccacctggagcacctcagcctggctcacaaccggctggcgatggccactgcgctgagtgctggtggcctgggccccctgccacgcgtgacctccctggacctgtctgggaacagcctgtacagcggcctgctggagcggctgctgggggaggcacccagcctgcataccctctcactggcggagaacagtctgactcgcctcacccgccacaccttccgggacatgcctgcgctggagcagcttgacctgcatagcaacgtgctgatggacatcgaggatggcgccttcgagggtctgccccgcctgacccatctcaacctctccaggaattccctcacctgcatctccgacttcagcctccagcagctgcgggtgctagacctgagctgcaacagcatcgaggcctttcagacggcctcccagccccaggctgagttccagctcacctggcttgacctgcgggagaacaaactgctccatttccccgacctggccgcgctcccgagactcatctacctgaacttgtccaacaacctcatccggctccccacagggccaccccaggacagcaagggcatccacgcaccttccgagggctggtcagccctgcccctctcagcccccagcgggaatgccagcggccgccccctttcccagctcttgaatctggatttgagctacaatgagattgagctcatccccgacagctttcttgagcacctgacctccctgtgcttcctgaacctcagcagaaactgcttgcggacctttgaggcccggcgcttaggctccctgccctgcctgatgctccttgacttaagccacaatgccctggagacactggaactgggcgccagagccctggggtctctgcggacgctgctcctacagggcaatgccctgcgggacctgcccccatacacctttgccaatctggccagcctgcagcggctcaacctgcaggggaaccgagtcagcccctgtggggggccagatgagcctggcccctccggctgtgtggccttctccggcatcacctccctccgcagcctgagcctggtggataatgagatagagctgctcagggcaggggccttcctccacaccccactgactgagctggacctttcttccaatcctgggctggaggtggccacgggggccttgggaggcctggaggcctccttggaggtcctggcactgcagggcaacgggctgatggtcctgcaggtggacctgccctgcttcatctgcctcaagcggctcaatcttgccgagaaccgcctgagccaccttcccgcctggacacaggctgtgtcactggaggtgctggacctgcgaaacaacagcttcagcctcctgccaggcagtgccatgggtggcctggagaccagcctccggcgcctctacctgcaggggaatccactcagctgctgcggcaatggctggctggcagcccagctgcaccagggccgtgtggacgtggacgccacccaggacctgatctgccgcttcagctcccaggaggaggtgtccctgagccacgtgcgtcccgaggactgtgagaaggggggactgaagaacatcaacctcatcatcatcctcaccttcatactggtctctgccatcctcctcaccacgctggccgcctgctgctgcgtccgccggcagaagtttaaccaacagtataaagcctaaagaagccgggagacactctaggtcagtgggggagcctgaggtacagagaagagtgaggactgactcaaggtcacacagtgatccgggatcccagaactctggtctccaaattacagcccaggacacctttctctgccgcctgctgcatcagtgggtgacccccttcccgggctgcactttgggtccagctgtggaagccagaagttgggcggtttcagggacagccgagaataatgttgacctgtcagatcaacaaatcttcactgagcatgtattttgtgccacaccctgctctgggcactgggaatgctgggaaatgagatacattcccgccctcaagaatctcccagtctggtaggagagagtgctgcagagccacgtggccgccacgcagtgtgcttagggcctgaggtgtgaaagcccagggctccagagctcggcaggccccgctggtttggtgcggtgagtcctgccccggctgtgccagggtgagggagggccaagcccaggaggatttgtctgagacatttccaagcagactgtttgtcacgtcttctgagaatgactttcagtctctctgaaaatgaaaagcttaggaccggaagagagaattggagctgtacgagtgtgtctcggatctggtgttgttaggtgggccacggcggctccagcagggtctggttaaggggtccagcccagcactggaccattccgtctcctgctctggacttgccctctcccttcctggcactctcatgttgcataccctgaccccagtgctgctctaagcaccgtccctgcccagccccacttctccatcgcagccccaccttggctgctgagccaggagctaaaaccttagatatctggttctgttttgcacccagcttggcagatgtggatttgaatccaagccttgtgtctgcnnnnnnnnnnnnnnnnnnnnnnnnnnnnnnnnnnnnnnnnnnnnnnnnnnnnnnnnnnnnnnnnnnnnnnnnnnnnnnnnnnnnnnnnnnnnnnnnnnnnnnnnnnnnnnnnnnnnnnnnnnnnnnnnnnnnnnnnnnnnnnnnnnnnngcaggggctgcaggccgttaagtggacaggaagtggccccacatagcccgagcagggtctggaagcatcctgtgctgtgcacacctgctctctcctctctcccaggcaggcagctgcaggcgctctcctccttctctgcctgtttccctcctcccttcctttccaccctggtgtgggttctcctgttctctctgtgctcttgcattctctcattcccttttcctctatggagcagagcctggagtttgagactatggaatccaacctccccattggcacagatggggaaactgaggcttaggaagagaatgaaacttgtggagagcttatacagagcctctgggggaaaaaagagcccttatttgtggggtgagattgggggttggaccagagtgatgtcctctctcagctatcacatcacaagataatgctggctccaaacttcctttctgtgcctcatcatgcaaggatcttttttccctcttacaaaaacaggtaaaaagcctcacccagatgacccccatccctcataccatggagtcatgagctgtctgggaagaatggacgtgctgggaccaactcaagaccttgttttgctgtcttcatcatcttacctgtgcttggcccacagtctggctcatgatgtgggctcagtaatgtgcgagaaagtgaaaatgccactctctccaccccattttacagaggagaacaccaaggcccagaggaagttaagggagagtcaatgggcagagccagggctaggccctggtggtgtgtggagcacccaggcagacccagtcctggttgggatcacacccacgggtgctactgcacgtaacactcctccttaggcctggaggccaaggtgtgggtccccacgcctgatctttgaaaacactacacagggctgctgtcacttcccagggcccaggcctcagcccaggcctcgggaccaactctttgtataacctacctgaatgtattaaaaactaattttggagaagcagtgtggctgccagcttcctctttgcaatccgcttcattgcgtccactagaacccctcccgtccaatcccattccgttcgtccaatcatcatggcaaatccctggggacactgagactctgggccagtggcttcacgtttctgaatacctttaatagtttctctgcgttgcag

SEQ ID NO: 467 - DNA, 21295 bp, Homo sapiens
  misc_feature: Incyte ID No: 012995.19c
  unsure 8301, 13768-13798, 16868, 17649-17999: a, t, c, g, or other
cttttttttgttttttgtaggtagaatcatttttattggagcatgacctgtttggggcttataactctgcagcccctatgggtagctgggggtgggggaagatagtatcaaaaaacggtgaagagagctgatgaggctgtggggactggctggaagctgctggcagggtggagtgggctggggccccggcagattcagatcgaggtacagcagcgttaataatactcttggagcgttaatactctggggaggggcaggcacttggggggccctagggcatgaaggcacttggggttggggaggggacaggggatgtactgcgggactgggcggggccaggccctggggtttggcaggcactttggggagtgctggggttgggcaggttgggccccgacagcccagaaggctttggtagtggcacgcacagtctctgggccgggtctgcattaaatagaagaggcttctttagtgctcatctcgaagctctgaaggcagaaacttgtactgctgctgccggatctgggccagtttcttccgcgcctcttccagctctcgttccttccgaagcatttcttcctgtgctgcgatgatctgggcaatgccgccaaccatcttctctttcaccaccactgtctcattctcctgctcttcaaaggctgcagccttctgtgctgctttcaccagattatctgaggctcgcttcactgcgttgccagcagcctgaagtcgtttcattgcctccgagtcctggtcagccttgaccttgcaggccacaaggagctgggctgtggaggcagctacctgcttggctgatgagatgagcttctcctggctggcatggccttgtacagctgcattggctgcctcacacagattgttggtggccgcagccaccatccgggcagcagaaatgaggccctgggaccactgcccatcgtccagtgcattggctggaatggcacccaccttcccttgggccactagttctctctgggcagccgacgcagcctttaccagtgcactggtggctgctgcaatggacttggcagcttctagtatctgctcctcaaagttcaaggactcatctgcctccttgggtttggcccggggcttcagctgctctagctttttggctgcagcctcaatggcggctgcagctcccaggagctcattctcagcaatgactgtggggtcctctgggtctacccattctgttcccttcatggcttcagcagcctggatgagctcagtgacggaaccagccacacgctttgaatgtcctgtcaactgctgcttcagttctgggcttggcttctgcagggtcagcagtacatggtccagcagttccaggtagccattggcacactcccggccatagtgccagggctcgaagccgcacatcaggggccacttctgggtggtaagctgcttccttgcaagcccgaagcatatctgcaatagcacggcggctcagattggctgtggcaatgacatcttcctggcgacaggaattgccagcagcaacggccttggcggttgccatggtgatacccttggtcattcggatgaagtcttctggggtagaggtcttggcaggtggctctggggaacagaaaaccgccagctcctgccgtatgtgttctgtggttgcctccagggcccgagtgcctttggtggcctcatcttccacggcttttactgtcttaagcaatgatgtcacattggtcaccatcaccttggcagagttctttagctgccacacagcagggtcatctccaactttgccagctgcagccttcgttgcactgatgaggtctcccagggctttggctacatctttcactgcgttgattagtaccacctgggtctcagggtcctcagctcccaggctggctgcacccagcttgaccacatcagcgaggcgggtgatggtcgccacggaggactgggcagcctgcgccaacttctcctggctcccagctgcgttttgcaccaggaccttggtgtcctccaccagcaccttcgcagtcttcaggatgccctcccggtggtcagcgaaagtttcagtaccctcacgattgagcgtgccagcagtggcgaacatgatggtggtgtcgaggtcagcaatgataccagacacagcgctggctgctgtgatgcaggcctgggtgccacgattcccagcctggagcgcagccaggacgtgggagaccttctcagagactctccgggcacactctatgagctccttcttggtgtaggcatcactggggctgcactgcagggcgcctgccttggtgaccagagcggcacagccatggcccagctcctgtacccggtgtttgatatgggaacctatctcttcattttcagcagccaccgctgcaggcttggcctccgaggccagacggccatagtcactggtcagctggttagcaagagggcccagctcctctgggctggtgtttgacttggtaaccatctcctgaacagtcactgcaatggccttggctgtccgcaccatagttgtttggtaatccacgaaggaaccttctggttcacccattggtccttcatctagctggttgatggcctgggtgatggagtccaccatgccacccacgaccccagcagcactggctgcctcgttgagggttgttgtcaggtcctctacggcctcggtcatcatctgcacagcctcctccagggcttcctgggtgtgagctgcttgctttgggttaccaccagcctccttggcagtgtatagcaactgcagggcagactctgccaatgttttagtctggtccaggagtgccatctgctgcgggtggctcagggtcttggaggcagcacccactgcagccagggtgagcggctcaaagtactgcgccatctgggacaccttgtgtcccagctgggaggcttcagccccgggcagcattggccagcggctcaatgagatgggagatctcttggactgcagtgagcatctgagtgtgcaaggcctcttgagagattccctcacggggagcaagctgctggctgactgcagcgagggaagcctggtctaggtcccgtagacaactgttcagagctgcaatggccgtttcacactccagctgccctggagccttgtccctcatgcttgtaattagcttcttgatggagtctgagacagtacgggagtggccggccagcaccgaccagctcggggggtcccggggattgactgcgagggcccgggctgtctggatgagtcccccggcactctctaacattgtcttggcagagatcacaatgggctccatggcagcccgaccctcagggctgatctgggcaggaatgctggagaactcagggttggacgcaaaggcactcagattgtccacagcctccagcagaggggctgttgctgctcggcactgggcacggttctcctctgtgaaggccccatctagcgccttgatggtcttgacaagattagctgtgctgttggccacctccttggctgactgtacaaactggcgcttggcagtaggattggtggtacgggcagaagccaggcgacagctgttacacagtgcagaggtgtgtttagccacaatggtggctgcagagagcacctgggcctgggtacagccaggctctcccaaactctggcaggccatctgaattgcctggtttgcacgggcaaactgtgtgggctccactagcccttgctgtccagcttggctattggggtcagagacaccaaccagatatgcagcctgtgcagctgcctcggtgaagccacaaagtgcctttgaggctgtggaaatggcatctccaaactctggcaggtttccgttcttggcattttgggagatgccagtcatggcctcgcccagcacctttgagttctccattacactgtccaggcaaccaaagtaggacatgtcattgatgggctggactgggttctccaggagttcccggaccgtctccaattcccgcagggcgttatcacactccttctggccgggtgcctgctgggtgcacatagtgatgagctgattgatgctgtcagttactgccctggcagctgcagccagctgactcttgaggttaggggcagcagggtccgtggacagggccttggcagccagaagaagtttgcttgaagacatggagatgcccttcaagttggacacaacttgggctcggtcctcctggctcggagcctggcctgccatctccacaccagcttccaggaaggtgctgaagtcctgtccaaatcggcctgaggctcgagccaggtcctgaggggttccccgagaggcctgcaccagttctgtggctgcctgattcagcccagcagcagcttcattcaaccggctctgagcttcttgaaatgtcccagtgctaggaggaagcgagtcactcaggagtcgcttgctggcatctccaactgccctcagggcattatccacatcgcgctggccaggtaggcagctgacacagcggttcagagcctgggtcactgctttagccacctgggcaagccgctgctggctctcagggtcccctggatggccagctgcctttttcgcctcctcaatgaggctgctggccttgtccagcacatcactggccgtatcaagtacaatggcctgcactgcaggatctgacgtcagtgcagcgactcccctagcggcctgggccagtgaccgcagcccacctgccacatcccgagctgcaatacctgcataattctcattgccctgggcaacctctcccagtagctgggcgatggctgagctcacggctttggtgctgttgcccaggtcctgggtacacttctccattgtctccccaggtaagggtttaagcttgccatctcgagctgctgccttcacttcctgtagatctttctctagattctgtaccacactcagtgcagaatccatctccaaaggtccacatgcttcctgagccttctgggcagccgtccggagttcagccagcgcggtgcccaggttcttggcacactgactcagctgcatggctgaagcctggtcctgaatcgttggcactgaggcctttgcagctgccaccatcttcccacctggctgcaggaagctctggctggcagcaatgagggcaagctgagcgctggggctgtcaggctgggcttggcttcctcggacgccctgcaccagcagtggaatctgctctgccactgccttgcagctctgcaccagcaggggctgggggccggcagaggccttgggggtagaggctgcgtgctgagctgcagcgatggtctgtgtggctgaggctgcagcctgcttggctgcatgctccaggcgctgcaccagctttttcttgatggcattctgcgcagctgcattggtggccatgcgcagcccctcagctgcctcccgcagccgctgctgctgctcctcactgtcagggtgggcagctgctcccttggcagcctctaccatcttggctgtggcatcagctaggatcttggcagcacttaagagcttgcgggagttctccagatcactttccccctcagcatcagccttgatggcattgaccaggtcagatgtggcttgggccaggatgcgggcctgtcgcaccatctccccagcatcacccatggagctaaagatgttctcagtgacggttaggatggtgtcagtagcctggtcataacggccagcaggcccagcccctgtggcatgggctttcacatgctgcagcagctcatttagggcctgggtgacagctgtggctgctgctcctacccctcgcaacagttgcccatcctctgtagctgcctgggaggcagacacacagccctccacggctttggctaccagtcgtccagcctccaccagttgctcttggcagacaggtgagctgattgtaggtgccaccaccttagtacaggccactagttgggaagtggatagggcacactgtgttgctgcagcaataacttgggtctgaagtcccgagtcctctgtccgctgggccacactcttggccttgaggaccagggcagctgcagcacttgccacagctttggcgagctgcattagcgcatcctggaagtgggggtcagtatcactttccccaatttgttgcaacagctccccactggcctggcccacgttcccagctgcttgcagcaggttctgacggggctcagcactggctggttgggcactgcgcagcagttctgacactgctcccgcaaggccctttgctgcctgcaacaggggccgaccactgccgccttcgtcctccagcaaggcagccagcagcttcaccccacgggacatctccgtcaggttggaggagattgtggtgactgcacagcccactgcggtatagtctgtctcagcagggtcccctgctgtcaggttcaccacagacgcagtaccagctgtgatggcatctacctgagagtggatctcatgctttgattcatccatcttgtttttacgccaggccttagaggcagcatcctggccaagaggcggcagagtgtcaaagtcatccagggtggcctgggcagcctgcacggcctgcatgctggagttaatggttccagtgagtgcctgctgggctgaagtcagaggaggcatgtgtcctcggtgcatctggccgctggtaatctgctgctgggcagggggcatgctgcccacctggaaattctcaggaccagaggctccagagcgcatgatggcaggcagggccacagagccatgctccactttccccacccggttgtattgctgctgcaggactgttgactttttgggggacactgagtcctccagcatagtagactcctcatctccttccagcccaaagtgatccttgctttttttcttcttcaggatgatatcgatgtagccggcaatgagctgtgcaatctgctccccttcagttgtctgtactgagtaatagccatcttggtaatctccaaaatccagggtgaagcttttgggagacgcagcccagcgtttgatgttggtgaggttccactcctggatcacttccttggtcttctcatccactcgcatcacacactccttggtgatgcccagaagcctgggcactagcttgttcttccctttcattttttccttcaccaggaagaaggagacaccgtaagtcttgagagaacgggctagcttcacgtagcggaccttggcctcaatctcactcatctgcccacaattcttgtgtgcctggaagatcttacgctctcccttctgcttcacatactccttgggcaggaagtccttcaggtcaaggaagccagccttgtgcttctgctcattgtggggcccaaactggatctggcattggaagccagcaaactcacaggccttgtcaaaggagacagggtgggagccattcaggatgtcatctcgtgcctgcacatacaggaggttcagctgtacagggtcccgggaatccacattctggtctgagtaaaagaacttcctccgcagcagcagcgtctcgtgctcctctacaccctgctccctcagtgtccgaccatggtccagccagttcaactcatcatctgtgtgcaatttctgctttagtttctccatcttcttttcatctcgcagcaatgtcttgtcctttcttaaggtccctgttatttcctcctttttctcttccatcagctctcgaaccaatgaatattcatcatgattggtgatgccaatgcgggcacagatggtcatgagcatgtcagtgacagtcttagagtcatccaccatgatcgtcttcacagttccatccagcatacggatcttcaggggtctctgtttcttcctgtactccatagtgtccccatttcggagcatgtagtagtccaaagctttcccagcctccagccatataccctttttggggtcatcatctgacagaaagagcccaaagtcgctgggaggaccagctggggcctctgggatccgctcacgaatgatgcggcaggcgtcgtacaccatggtagacggctcaaactgcatcgtcttcaccacattcccaatgctgatcttcagtgaaagtgcaaccatggtggcagcttcttttctccagcctggctatacctgcgctgcctggctctgcgccccgcccgccggcccgccgccccgccgcttctcgggtcgccctcgggctccggcctcgccctcccttcgacactctctcggccacttccgtcctgggaacgtcccccacccgcgggcggcgccctgggcccgcgctctatggtcgcggggngcaggcaggaagctgctctggccccgttctcgatgctcgggagccgccaaagcccggcagcccctccctggcaggaagcgagggtgcggcgcaatccggagaggacgccaggacgacgcccgagttccctttcaggctagaactcttcctttttctagcttggggtagaaggcggagcgtagccccggaacccccgccctcggggtgcgaggcggcagcagggccgtcccctacatttgcatagcccctgggacgtggcgctgcacccaagcctcttctcagttggagggaactccaagtcccacagtgccacggggtggggtgcgtcactttcgctgcgttggaggctgaggagaattgagcctgggaggcgggtccggagagggctatggaaagccgccggcggggaatcccggccgtagagggacagtggataggtgccccgaggcctacagctgggcctggggctcgtgtctgggcttcggacgttggggcccggtggcccaccctttccgtagttgtcccaaatggagctggaattggatgctggtgaccaagacctgctggccttcctgctagaggaaagtggagatttggggacggcacccgatgaggccgtgagggccccactggactgggcgctgccgctttctgaggtaccgagcgactgggaagtagatgatttgctgtgctccctgctgagtcccccagcgtcgttgaacattctcagctcctccaacccctgccttgtccaccatgaccacacctactccctcccacgggaaactgtctctatggatctagagagtgagagctgtagaaaagaggggacccagatgactccacagcatatggaggagctggcagagcaggagattgctaggctagtactgacagatgaggagaagagtctattggagaaggaggggcttattctgcctgagacacttcctctcactaagacagaggaacaaattctgaaacgtgtgcggaggaagattcgaaataaaagatctgctcaagagagccgcaggaaaaagaaggtgtatgttgggggtttagagagcagggtcttgaaatacacagcccagaatatggagcttcagaacaaagtacagcttctggaggaacagaatttgtcccttctagatcaactgaggaaactccaggccatggtgattgagatatcaaacaaaaccagcagcagcagcacctgcatcttggtcctactagtctccttctgcctcctccttgtacctgctatgtactcctctgacacaagggggagcctgccagctgagcatggagtgttgtcccgccagcttcgtgccctccccagtgaggacccttaccagctggagctgcctgccctgcagtcagaagtgccgaaagacagcacacaccagtggttggacggctcagactgtgtactccaggcccctggcaacacttcctgcctgctgcattacatgcctcaggctcccagtgcagagcctcccctggagtggccattccctgacctcttctcagagcctctctgccgaggtcccatcctccccctgcaggcaaatctcacaaggaagggaggatggcttcctactggtagcccctctgtcattttgcaggacagatactcaggctagatatgaggatatgtggggggtctcagcaggagcctggggggctccccatctgtgtccaaataaaaagcggtgggcaagggctggccgcagctcctgtgccctgtcaggacgactgagggctcaaacacaccacacttaatggctttctgggtcttttatttgtacccatgtgtctgtcacaccatgaatgtacctggggaaatcaactgacctccctgaacatttcacgcagtcagggaacaggtgaggaaagaaataaataagtgattctaatgctgcctaggtcaccctcaacccccatttactggcacaattgggtggagagaagggaaggggtatgattgtcctgatggctcagggttgcaggaggttcagaggggaaggaggaaaggccaggctggaggctgggctgttagcacttccctcccacagttcagacggctcactctgggctcaggtttgccatggcttcctttggtccaaacataggccctgtccttagtcctgtgccctgtttgacttttggccaggaggcctttttgtgctgctgctgttgcagggctagctgcatggcccatatgctcagtggccgcatgtaggccagtgagcggaacactcgctgctggcagtatgcctctggggtctggaaggccagacccaggcgctcccacacggtacggtagcagccttcagctgtctggaagccctcccaagtcaggccctcttggatcatggtagctgccagcccgtagaccacacccacccagacttcatcagactgcacactggatttatcagggacaccatggggctgcatcccattcacagcccccatggcccctcctgcaaaggcctggacgttcagctcaaagatagtttggagagcacggaccacatgttgggtaggaaacacctcagtgtctccttctcctaggccacaggccttcaggaaccactgtccagcacactggtcagacataacactacgagactgaggccgagagctgctgtcatagttgtaatagcggccattccacagcagtctctcataggcttcttggccccggctgaggatagaagaaaacttatcctggatgtcctgtgccccacacagagcagccatctggaccatcacagccacagctgccagccacagccctccacagtaagcactggggcctgtggtcacccatccatcataggtctggtctgcatagcctccattttcaatgagtccatcatggtccttgtcaaacttcatttcagattccatcacagctagacacacaggccacatgtccttcaggaagttttgatcacccgtgaggtaatagtcccgataaacctgcagcacaaacttcaggttcaggtccttccaatcagcagtatcatggattaaatatgcattgacgcggagccatggttcatcatctgggtccccaatatcatgggggatgacgttcctccttttcacaggtgccatcaccccactcatcaggtaccgtcgccgtgtcaggtcctccctgagagtggccagagccatgtcatactgtaggctgagctcaagtttgggccagagcatgatgagggcaaaggaagcataaaagtggacatcatatgtgttgtacatgcggtactcctggccctcaaggtagccaaatcgaccgtagtcccgtagggtggggcggaggtgacacatgtttctgcccagctcctctggtagggagtcctcaagaacttccagccacactgtgcctccatcagccaggaagtatagttcattgaacagcgcagatttgtaccaggcaggcagtgatctgtcatccaataccgggctctgccaagctgagatcctctcttcccactctgcgtatcggcacagtgcatagtggctgagggcaggtgctgcatctccatcctggccaaagaaccttgtataccgcctgtagtggacttggcctttagctccaaacatgatcctgggcatgtcccaagccagtgaaaactccaggcggcactggcctcgaggtcgcaacttgctggaaacacacacagctccagcaatgcctactcctttctgcgtaggggtgctttggccagtgggagagtccagctgtccatcctgaagtagatcctgccacacctgctgccccgtgctgtcagggtcaaaggctgtgatgtgggttaccgtggtagctgccgtgactcgtgcagccacagccatcgtgtaggggtttggaagggttggatgatgcaggagcagcccccggacagtttccccgctacgctccagacagaagggctcattccacaaaccccctggggcatcgtctccaccacccagtccattccgcatggagaacatgatggacacatctagagcttcgtccccttcattttccacatcccacacaaagactcctacaggcaggctgctgtcctggtagtcatggggcaagatgggtgtgatctgacggcaggtgagggtgacattctggccaggaagctgatagacagtccaggctcggggatagagggcatggtagaaagcaaagtacccacacaggccccagttccagctgcggaggacacttgggcgctccagggacaggacttgctggtacacagtctgcccttcccgacgcaggcacactgtgaattggtcagcgatgactgtccggtgctgatacattccagggttaagctgccaacgacagaactggcctctccagccacgggtaatagtgcctcccccgatgccacccaagggacaaccataaatctgtcttaggggtacagaattgatcatgtcgatgaaaggtgtcttcttttccacatgggtcttccggtaccaccactgcaggtacctcaagcccatgcctatatgctttatcatgttgcttagggagacgttgttagcttgaaagggtttcctcttctctgtaaactcatgagccagacagatgcgccagccaaagggaggcacctggtagcccatagctttaccctcataggaaaccatcagctgcccagagtcctccggattgcagcagtccgtctcttttgggggtcggctgtcttcgggactcttacagtctgtaacctgcacatccttggtgccgccagtctcttcagggcaataaacttgtggatcctctttggcacagcttatctgctccgaggctgggacgccggttcccatgttccctggatcctgggtccccatgacctcgatggcgccaagtcccgagccctcggatactaagtatctcgccagcctattccagatgcgggcgccggtcgttgttaggtatcgtcccggagggccggtcgttggggaaagcttaaatgagctggtgtttcagtggagccggggagctcttgcttcagtgggggcggcgacagcaaagaagccgccttgggctctccttcggttgtctctgtaggtcctggacgggaagggtcgggcctcgtcgtcattgagccgacgattagctcgcccggccaaagggcgactgggcccgcagagaggggaggagccgcggggccagcccaccaggcaccgccccgggacgggcccgcaaggcaccgcccccgggacctcggcccggcccctgggccacggcaccgggtcccccaggattgggcgccaggtcccgccggccggctccggggcagcgcccgcgcccaggtgccagcccgtgggaaggtgacctgggcgccgggatgacccgagccctttccggtctggcctgccgggcgcttccggccggaagggactccgcggagggtgggggaccgaaggaagtcccgcctctaccgcnnnnnnnnnnnnnnnnnnnnnnnnnnnnnnngtacctagccaggtccctgaggggcgggcagatgaggcctaggggtgccgatccctagtgtcgactatgcgagatctgattccggagctgccatgattgaagtggtagcagagctcagccggggtcctgtatttttggctggggaggcgctggagtgtgtagtgaccgtcaccaacccccttccgcccacggccacttctgcatccagtgaggccctggcctgggccagtgcccaaatccactgccagttccatgccagtgagagtcgagtagcactgcctcctcctgactctagtcagccagatgtccagcccgacagccagactgtctttctgccacaccgaggtgagaggggccagtgtatcctttctactccaccgaaaattctattctgtgacctgaggcttgatcctggagagtccaaatcatactcctacagtgaagtgctgcccatagagggaccaccctcctttcggggtcagtcagtcaagtacgtctacaaactgaccattggctgccagcgtgtcaactcccctatcactttactcagagtccctctgagggttcttgtgctgactggccttcaggatgtccggtttccccaggatgaggctgtagccccatccagtccattcttggaggaggatgaaggtgggaagaaagattcatggctagctgagctggctggggaacgcctaatggctgccacatcctgccgcagcctccatctatacaatatcagtgatggccgagggaaagttgggacgtttggcatcttcaaatctgtgtacagacttggcgaggacgtggtggggaccttaaacttaggggaaggaaccgtagcttgtttgcagttttcagtcagcttacagaccgaggagcgtgtacagcctgagtaccagcggcgacgtggggcagggggtgtcccctctgtgtcacatgtgactcacgcccggcaccaggaatcctgcctacatacaactagaaccagcttctccctcccaatccctctcagctccaccccaggcttctgtacagccattgtgtccttgaagtggagattgcattttgaatttgtaacgtcccgagaaccaggattggtactcctaccccctgtggaacagcccgaacctaccacctggacaggacctgagcaagtacctgtagacaccttcagctgggacctgcccatcaaggtgctgcctactagccccaccctggcctcatatgctgccccaggccccagcaccagcaccataaccatctgaaactggcccaccctggtgctagttccttccggatactgagaactcagcacctggactctaatgggacccactttttccacctggggtccaatgtcgtggacagtgagagtcgggctttcagctatagcattaatttatttgttcagaatacattggcagctgctagtggtttccctggaagtggcagcagcagtgagcagtcagcagatggatgatcagttgagtttagctggagtggggagcaggagccccaggaacaggggtgttggctgagccccattctgggtcaggccctccccctttgcagggcagccgagggtcagatttttgcaccaaggagaactggcaggttcctgcctcctgacgtacctcacacccagccgggaagtcgatgggatgctgggacctggggaaccaaggataggggaaggagtcagcacagtgaaaggctgcctttatccctgcccacatgttccctctctcacagttttccccccacagagcccctttcagtggccccttggtcctcctaactaagctgtcacctaccatatgtgggcctttttgttttataacaggagtattttctctccaggtccaccccaacctcccctgatttatagcctgaagccttatctttcacactagtgttggtcccttcaggtttggcccatcttgtattgctcttctgttcattcttacatcacagcaatctagtcactccctggtcatccctcagtcactcatatcagagtcattctctctggccatctttggtcactcacgtgtcacagcagcccacgccaacaggatgcagacaggtgcaatggaaacagtccttgcggagccaagactcacccagggtaaaatatttcccctcatagtgacagggggctagggaagaacgggaaatgttagtaggtgtaggagtgctgatgagaggcagaggctcttctggtctggggtggagacagtaagtacgcactatccccgtatttagtttgtctttcctgtttcacagctggaggaagcctgggtattttgacacgggatcatctgtaaggccccatcctccctgtgccctctctgctgctcctccattcctaacgcttcaccccactttaccttgagcttggaagtagcacttgctgtagactcctgggtgctggaggagtagagacatcaccaagcagatgatcccccagcctcctaggatccccttggcctgtccagcccagagcatccttagggccattgctgctgcacagccctctcagacccttcttggcctctgctcagctactctggtcttgactccttgactttgctttgcgttgctccttgagtcttagtttctgtctttctcccctgggctcctgtctcacactatctccctgccctctgctctcacaggctggggatgtttataaagtgaggacctggccccctgctgagtagagctggaaaagttgtaactctgtttcctgaggtgagggcatgaaaacaagaggtctagctttaacaagctgtgagagctgattcatgccccggcacagctagagggagggaggtggccatggagggggcactggactgggcacttccccagcaaggaggcaggaggggcaagggcccccaggtggtccccagatctcttccctgacctggagagaaggaagcattccaccttccccctttctcccccactgccaccaccaggggtgtgtatgctgggatccctgcctggaccggagggaggcatttcctggggatggttaatcctgtgccccagccaaacccangagctgcaatagggtgcgacggccagaagctccaggagagtgagcaggcactggatggagatgtgtttccctcagatcctagggcagggtttccctaatgtatccaagaaatagggctgcccctcagagatggtggggagggtctcttttcctcaggcattccagaggtgaactgtccattgcttatcaccttcaaacatacagcagatgtgggatcaccccacatctggggatggttctttcccctttcaaagaggagcatctctaagtgccctgatgggatgaatcactccaggttcacagaggtgtcctctctttcctcccatatataatggagtgaggtttttaggaatttatcatttggcatcctctgagtttcccacaggttctggaggagcccaggatggattattgagagcatgggctgtagagacagtcttcttggattcagatcctgactccacttagctatgtaacctggtcagattacttcacctctctgagcctgttcctcatctataaattggggatagtaatgccaactcattgggctgttatgaggattactgagataatgcgtgcagtgctcttatcaccatctctggtgcgtaacgtcaggaaatagcagttgctgtgattggggctaaagctctgaggcaaaatgggcgacattattttctttgaatgacattaagcagtttgtgcatagctgagggcttctattggggatggctgtctcctggcatagacctctgcacctttcacactcatactccttgtnnnnnnnnnnnnnnnnnnnnnnnnnnnnnnnnnnnnnnnnnnnnnnnnnnnnnnnnnnnnnnnnnnnnnnnnnnnnnnnnnnnnnnnnnnnnnnnnnnnnnnnnnnnnnnnnnnnnnnnnnnnnnnnnnnnnnnnnnnnnnnnnnnnnnnnnnnnnnnnnnnnnnnnnnnnnnnnnnnnnnnnnnnnnnnnnnnnnnnnnnnnnnnnnnnnnnnnnnnnnnnnnnnnnnnnnnnnnnnnnnnnnnnnnnnnnnnnnnnnnnnnnnnnnnnnnnnnnnnnnnnnnnnnnnnnnnnnnnnnnnnnnnnnnnnnnnnnnnnnnnnnnnnnnnnnnnnnnnnnnnnnnnnnnnnnaatccatgtcacctttcccacctctttcaaaaacaggtacctccaggaacattttggttttggcccttgtattgacttctgaatgtctagtttgagaaactgttcccaataagccttcttcccccagatctgcaccctcgcctctaccctaggacaagatgtccttttctcatcatcctgccaggctaactttaagtctcctgctttttctcacttggatttggatccatttcttcctatttccgctcatgtgaactctccagttctcctttctcaccactctcctgctagccatctctttggcactaaaggccctggtcaaattggatttctttcatttttccacacttcaaagacccatgttctaggtattctgcatagggatagtctctttggcatttatttggtttttctacgttttcagtcccatttactccaagactcactccctgccacctagtgcatcagatacagctacttctggctgacttttcaagggggaccaccctacctgtcatctcttcactgttcagaaatgactgtgtcagtgcacctcaaactcccttgctgtccttttccaaggagacagctaaggtggatggagatgcagaatggacctcacgttcgccctagtcaggactgataccctttccgtttcagaggattgccaagaaaaaactcacagttgaggcagggtgctctgaggtcggctgcggtgtgggaggcacggcctgggcctgctctctgggctggagcaggtggattcgaaggcctgtctagcacgagggcccaaaggtcttgtcagtggccagtagctctgccgcctttcccagagagggggtccaggggacatcctggaaggctgggccctgggccaccttctgctcttgcaagctagagccagcccaatagggggcggatgtgagtggggagctggggcgcatgaaggtgggggtgatgccgaaggggaagggatcgccagtggggattggtgcgtgtgcggaaacggggacagaagtgaaggttcatcgcctataacgaagatgaggtaggcatataggggcttctggaaagctagaggctgggctgagccaggagtcctctcccagaagttggggggcggtgcagaggtgtgggtcgagcccgcatgcgtgcctgctggggagggggtgagtggtgaggaccaggcccgctgggtcctgggggcgcggtggctggcgcgcaggtcccggagggggcggctggcgcgcactacacgcttggggacaaggaaaacatccgccggaggcccggccgggcggcgctccagcctcggggcaggtgcgcggagaggaagtgagagcattccggcccccccaccccaaccccggccgctggccctccggtgagtcacagccgacccccgccgccggagggagaggggagctgcgggccagagccccggagggtctggaggagccaggagggtttctgggagcagagggtcacttagtgggcttctgtcgtggtgtcgctacgggcgcgaaacggacactgaacacagtctgactgaatggaggcaggtggggagggatcccctgggagaacttggcgggccgagagcagaccccagggcaaggaggggcccccgagggggaaaccgggagtcgggcaggtggcgtaacccagaaagggaaggagagccggattgattggggtgagagaggaaggaagcacgccaagttaggcctgggagaactgagggacctgaggagggaggagggagaccaacacagggtgggaaggcggaaatggccaaaccccaggcatcaggtctgtccagaggctgacgtagacagtgaagggtgaagggtaggttttaggagtagggggagttatgattatttggttacattttgggattatttggtctcacaggtagaagggagcctgctggtctctgtgtaacggatggcttaaaagcaaggttgtctgcgtcttggattactgtctgccattcagcctttgccaaaaaatttggcactgatctgcacatttttatagtcatttaaaattgtatgactctgtcaaatgatttaagtaattttggtggatttttaaaaataaaaaaataaaaatagaaaagttgcacaatctaattcaatatttgacttaaaaccaaaagtgaggctctcagattggtaatatggtattcagcctttttcttgtttggcttttgtgccatttgcccctcactgacttgattgaattctttgtggctgatgcctcagtttttctggatcagtagtgctgcacttccacttttcctctccctcattttactgtctttatttttagccttttttctgtgtagccctctaacctgccctttatattttgaaccaaataaaacatttcttggaatgggagctttggactacagtatacagacaaacaactcacaattttagcatatgaggctactatcttctgtggatgtgtatgtaattatacagtttctgtatttatcctgtggctgatagaaaaagttaaagctgtttaattcaccatagtatttctacaacacagcaatttattagtctgacttctcttctaaaatcaactctaaaatggtattttgtacttgtctcagagacgaattctgccatgatccttatgatctgtgttatgttgggccaaaggtgattactttataaattataaagatccctaaactctgcattgcctttggtcccaaacaagcaaatctgggtcaattaatgaaaaagaaaagaaaagaaaagaaaatgtcttactttgggccctgttgcactctcccgtgctgttttagccccagccctactctattcccagtggcctttgccttcattccttctttgctctgctgggcatcttgagaggaaaacttcacaccgacttcctctactataaattctctccctcctctcaactctacacttctctttgccaacatacaccactactgcttcactgattttttttttttaagcccacagtcctttctggctcttttccacctttaacactcttatgttgaaatcttccgtttttcctcctttctctttagtaagacctcaggtttttaaaaaagctagggcttgattgtttattctgcatggtccacttctgccttccttcctcttctattacccttttcttattctagactgtttttaaactcagttatgcttgctttcaccaaagccttaacctttcctgtgattagaaaaagatgcttatgtttccattacttttcctacaagaaaacgccttct

SEQ ID NO: 468 - DNA, 8382 bp, Homo sapiens
  misc_feature: Incyte ID No: 407938.5
  unsure 5856, 8248, 8289-8290, 8335, 8347: a, t, c, g, or other
cggacaggcgcacacgacgcctcgagcacccttctcttcttgccgccggggacttcagattgatccttcccgggaagagtagggactgctggtgccctgcgtcccgggatcccgagccaacttgtttcctccgttagtggtggggaagggcttatccttttgtggcggatctagcttctcctcgccttcaggatgaaagctcaggggggaaaccgaggagtcagaaaagctgagtaagatgagttctctcctggaacggctccatgcaaaatttaaccaaaatagaccctggagtgaaaccattaagcttgtgcgtcaagtcatggagaagagggttgtgatgagttctggagggcatcaacatttggtcagctgtttggagacattgcagaaggctctcaaagtaacatctttaccagcaatgactgatcgtttggagtccatagcaggacagaatggactgggctctcatctcagtgccagtggcactgaatgttacatcacgtcagatatgttctatgtggaagtgcagttagatcctgcaggacagctttgtgatgtaaaagtggctcaccatggggagaatcctgtgagctgtccggagcttgtacagcagctaagggaaaaaaattttgatgaattttctaagcaccttaagggccttgttaatctgtataaccttccaggggacaacaaactgaagactaaaatgtacttggctctccaatccttagaacaagatctttctaaaatggcaattatgtactggaaagcaactaatgctggtcccttggataagattcttcatggaagtgttggctatctcacaccaaggagtgggggtcatttaatgaacctgaagtactatgtctctccttctgacctactggatgacaagactgcatctcccatcattttgcatgagaataatgtttctcgatctttgggcatgaatgcatcagtgacaattgaaggaacatctgctgtgtacaaactcccaattgcaccattaattatggggtcacatccagttgacaataaatggaccccttccttctcctcaatcaccagtgccaacagtgttgatcttcctgcctgtttcttcttgaaatttccccagccaatcccagtatctagagcatttgttcagaaactgcagaactgcacaggaattccattgtttgaaactcaaccaacttatgcacccctgtatgaactgatcactcagtttgagctatcaaaggaccctgaccccatacctttgaatcacaacatgagattttatgctgctcttcctggtcagcagcactgctatttcctcaacaaggatgctcctcttccagatggccgaagtctacagggaacccttgttagcaaaatcacctttcagcaccctggccgagttcctcttatcctaaatctgatcagacaccaagtggcctataacaccctcattggaagctgtgtcaaaagaactattctgaaagaagattctcctgggcttctccaatttgaagtgtgtcctctctcagagtctcgtttcagcgtatcttttcagcaccctgtgaatgactccctggtgtgtgtggtaatggatgtgcaggactcaacacatgtgagctgtaaactctacaaagggctgtcggatgcactgatctgcacagatgacttcattgccaaagttgttcaaagatgtatgtccatccctgtgacgatgagggctattcggaggaaagctgaaaccattcaagccgacaccccagcactgtccctcattgcagagacagttgaagacatggtgaaaaagaacctgcccccggctagcagcccagggtatggcatgaccacaggcaacaacccaatgagtggtaccactacaccaaccaacacctttccggggggtcccattaccaccttgtttaatatgagcatgagcatcaaagatcggcatgagtcggtgggccatggggaggacttcagcaaggtgtctcagaacccaattcttaccagtttgttgcaaatcacagggaacggggggtctaccattggctcgagtccgacccctcctcatcacacgccgccacctgtctcttcgatggccggcaacaccaagaaccacccgatgctcatgaaccttcttaaagataatcctgcccaggatttctcaaccctttatggaagcagccctttagaaaggcagaactcctcttccggctcaccccgcatggaaatatgctcggggagcaacaagaccaagaaaaagaagtcatcaagattaccacctgagaaaccaaagcaccagactgaagatgactttcagagggagctattttcaatggatgttgactcacagaaccctatctttgatgtcaacatgacagctgacacgctggatacgccacacatcactccagctccaagccagtgtagcactcccccaacaacttacccacaaccagtacctcacccccaacccagtattcaaaggatggtccgactatccagttcagacagcattggcccagatgtaactgacatcctttcagacattgcagaagaagcttctaaacttcccagcactagtgatgattgcccagccattggcacccctcttcgagattcttcaagctctgggcattctcagagtaccctgtttgactctgatgtctttcaaactaacaataatgaaaatccatacactgatccagctgatcttattgcagatgctgctggaagccccagtagtgactctcctaccaatcatttttttcatgatggagtagatttcaatcctgatttattgaacagccagagccaaagtggttttggagaagaatattttgatgaaagcagccaaagtggggataatgatgatttcaaaggatttgcatctcaggcactaaatactttgggggtgccaatgcttggaggtgataatggggagaccaagtttaagggcaataaccaagccgacacagttgatttcagtattatttcagtagccggcaaagctttagctcctgcagatcttatggagcatcacagtggtagtcagggtcctttactgaccactggggacttagggaaagaaaagactcaaaagagggtaaaggaaggcaatggcaccagtaatagtactctctcggggcccggattagacagcaaaccagggaagcgcagtcggaccccttctaatgatgggaaaagcaaagataagcctccaaagcggaagaaggcagacactgagggaaagtctccatctcatagttcttctaacagaccttttaccccacctaccagtacaggtggatctaaatcgccaggcagtgcaggaagatctcagactcccccaggtgttgccacaccacccattcccaaaatcactattcagattcctaagggaacagtgatggtgggcaagccttcctctcacagtcagtataccagcagtggttctgtgtcttcctcaggcagcaaaagccaccatagccattcttcctcctcttcctcatctgcttccacctcagggaagatgaaaagcagtaaatcagaaggttcatcaagttccaagttaagtagcagtatgtattctagccaggggtcttctggatctagccagtccaaaaattcatcccagtctggggggaagccaggctcctctcccataaccaagcatggactgagcagtggctctagcagcaccaagatgaaacctcaaggaaagccatcatcacttatgaatccttctttaagtaaaccaaacatatccccttctcattcaaggccacctggaggctctgacaagcttgcctctccaatgaagcctgttcctggaactcctccatcctctaaagccaagtcccctatcagttcaggttctggtggttctcatatgtctggaactagttcaagctctggcatgaagtcatcttcagggttaggatcctcaggctcgttgtcccagaaaactcccccatcatctaattcctgtacggcatcttcctcctccttttcctcaagtggctcttccatgtcatcctctcagaaccagcatgggagttctaaaggaaaatctcccagcagaaacaagaagccgtccttgacagctgtcatagataaactgaagcatggggttgtcaccagtggccctgggggtgaagacccactggacggccagatgggggtgagcacaaattcttccagccatcctatgtcctccaaacataacatgtcaggaggagagtttcagggcaagcgtgagaaaagtgataaagacaaatcaaaggtttccacctccgggagttcagtggattcttctaagaagacctcagagtcaaaaaatgtggggagcacaggtgtggcaaaaattatcatcagtaagcatgatggaggctcccctagcattaaagccaaagtgactttgcagaaacctggggaaagtagtggagaagggcttaggcctcaaatggcttcttctaaaaactatggctctccactcatcagtggttccactccaaagcatgagcgtggctctcccagccatagtaagtcaccagcatataccccccagaatctggacagtgaaagtgagtcaggctcctccatagcagagaaatcttatcagaatagtcccagctcagacgatggtatccgaccacttccagaatacagcacagagaaacataagaagcacaaaaaggaaaagaagaaagtaaaagacaaagatagggaccgagaccgggacaaagaccgagacaagaaaaaatctcatagcatcaagccagagagttggtccaaatcacccatctcttcagaccagtccttgtctatgacaagtaacacaatcttatctgcagacagaccctcaaggctcagcccagactttatgattggggaggaagatgatgatcttatggatgtggccctgattgggaattaggaaccttatttcctaaaagaaacagggccagaggaaaaaaaactattgataagtttataggcaaaccaccataaggggtgagtcagacaggtctgatttggttaagaatcctaaatggcatggctttgacatcaagctgggtgaattagaaaggcatatccagaccctattaaagaaaccacagggtttgattctggttaccaggaagtcttctttgttcctgtgccagaaagaaagttaaaatacttgcttaagaaaagggaggggggtgggaggggtgtagggagagggaagggagggaaacagttttgtgggaaatattcatatatattttcttctccctttttccatttttaggccatgttttaaactcattttagtgcatgtatatgaagggctgggcagaaaatgaaaaagcaatacattccttgatgcatttgcatgaaggttgttcaactttgtttgaggtagttgtccgtttgagtcatgggcaaatgaaggactttggtcattttggacacttaagtaatgtttggtgtctgtttcttaggagtgactgggggagggaagattattttagctatttatttgtaatattttaaccctttatctgtttgtttttatacagtgtttcgttctaaatctatgaggtttagggttcaaaatgatggaaggccgaagagcaaggcttatatggtggtagggagcttatagcttgtgctaatactgtagcatcaagcccaagcaaattagtcagagcccgcctttagagttaaatataatagaaaaaccaaaatgatatttttattttaggagggtttaaatagggttcagagatcataggaatattaggagttacctctctgtggaggtattgacttgtaatctcattttcctttcaaaaaaaaaaaaaggcngctaaggtggcttgttgggatgtaaacatgttttcagatgcagtaaggtttagtgtaggacagccttcctgacccagtggcatgaaaaccattacaggattaatagttctcctacttccacaatgtgccaaaagtctgcatcccagcattttgtttgcaggagaactgatgccattcctaagagctggactcactgtttctcttcatcacaaggagaaggagtccaaactttaatcactccactgtatgctccctgagataaaacagtaaaaaatccgcagccatagttcacttaaaacaatttcaagctcacttttgaagtaatgggggcctggaatgctaggtgagcatgaagataaacccttgctactatgtagcaacccaattggacctttttggagaaataggtctgagtctggattctgggggacatcaataagagcccttcacataaaaatatagaaatccaggagactgtttcgagtgcaacagaagttctcagtatttggagggtcctctcaaaaattctgcggccttactttgatattgacacctgcactgtgccattcctgattattccattcaggatctgtatcagcgggatggggcatggtccccagcacaactcttctgggttaaaaaaaaaaagccaggtgattcctttgtgtgttatgtcgtaagtggagtgacttcatcatatatggaagaagatttctatattcagctttttctgcaggttggagtcagcatagagttggaaaatcagctttggctttctttcctgtctcatttcctctagtgttctcctttttattgtcatcagctctcaacaactctgccacttttgtgtcccaaggtaataagatgtaggaaacaaaacattgtaaagtggagcaagaaaagttatcaattaaccacatcagagtcaaatgtcttgggtgacactaaggaggatatgggcaggtgataccagagtgctttatcttgtgatgttgatacagtagcagcctctcagacattcagccaggttggatttctcatgagtttgtcacctagttttgaatcctatcccgttggtttctgcaggaaaaaaaaaaaaatttatgtggtttttaaaatttgttctgagtggggagaatcttagggggaatgtactgaatagtatcatgggctcagctcccccatgcagggccaacaaataccaaaatgagtaaactgggaagcttttctctctttctgtcttcatcccagatcaaagaatcccgagttaggatctggatgaaggataagcccctgaattgtcgatgggctcacccccacactgacccagcatctgaacttgcttaacagggagccggggctaaactgcttcaccctgcctgagaaccagggagcactgcatttctccacagggtggaggagaagaggcagaataaaccaagcctgggacacctccctcctgtctaggtgtactcattcttctgtttcaaaagaaggcaaggacatgaagtcaacttctacctatcttctgctgctggtgtcttatgtattctcagtttgacctgattcctcttctgtcttttgacttaacattaggggttcttggtcataacctgctctgatgtacataaagatttcaggttcaatatcaatgtgtcttaaaacagaagtattttagcgggtggggggtggggtggtggggacaaacaacgcaggatataattgccaaaaccaggcttgaggttggtgactcttgaaagattttctttcttcaggcctagatcagaaaattaagtgcagcaatatcatgaattctcagaagccctttcagggagccagtgagtcatacagtatccacagttgagtcacttaaagatgtcagtatacgaaacattattcacaatccttgggcaatctcatttttttttccttctcccctcctcccctgccccccatacatttctatccttgagttagttttggaggggcaggaagtacttaacatctcagaagctagattgggaaacatgctcagctataagaactgagctttaaattttgagtttaaaaatgtacatcaggagcagctggggagggtctttttttaaaaaaatctttcaaatttggttttctgtgcatatggccgttttgtaaatactttggggtttttcatttttttgaaagtagatgaaatctgttgtgggatttttttcccgaaacattacaaaataacctgtttatttacatgcaaataaacttctttgtacaatgccaacttttaaaaggtcactaaagttaactggacaataaactaggcagacattgctttacaaaaaagatggaaagcccaaaatgccacttatagagaacccacagttcagttttattcagngcaaagaaaaaagaaactttccatcatactagaagaaactnnggccgtaaggtttgggatctgtcctcattgcatgtgtagtttgancacagatcccanactttccatcatactagaagaaacttggccgtaag

SEQ ID NO: 469 - DNA, 835 bp, Homo sapiens
  misc_feature: Incyte ID No: 233778.10
caaaccagcctcatgtgacaaagcgcaggacccctcactgccccaactgcttgctgttctctctttcttgggctctaaggacccaggagtctgggtgcacagcctccttctctctgagattcaagagtctgatcagcagcctcttcctcctccaggacccagaagccctgagcttatccccatggagctctgccggtccctggccctgctggggggctccctgggcctgatgttctgcctgattgctttgagcaccgatttctggtttgaggctgtgggtcccacccactcagctcactcgggcctctggccaacagggcatggggacatcatatcaggctacatccacgtgacgcagaccttcagcattatggctgttctgtgggccctggtgtccgtgagcttcctggtcctgtcctgcttcccctcactgttccccccaggccacggcccgcttgtctcaaccaccgcagcctttgctgcagccatctccatggtggtggccatggcggtgtacaccagcgagcggtgggaccagcctccacacccccagatccagaccttcttctcctggtccttctacctgggctgggtctcagctatcctcttgctctgtacaggtgccctgagcctgggtgctcactgtggcggtccccgtcctggctatgaaaccttgtgagcagaaggcaagagcggcaagatgagttttgagcgttgtattccaaaggcctcatctggagcctcgggaaagtctggtcccacatctgcccgcccttccagcccttccccagcccctcctcttgtttcttcattcattcaacaaaatttggctggg

SEQ ID NO: 470 - DNA, 5691 bp, Homo sapiens
  misc_feature: Incyte ID No: 474630.19
cccgcgcccgccctcggacagtccctgctcgcccgcgcgctgcagccccatctcctagcggcagcccaggcgcggagggagcgagtccgccccgaggtaggtccaggacgggcgcacagcagcagccgaggctggccgggagagggaggaagaggatggcagggccacgccccagcccatgggccaggctgctcctggcagccttgatcagcgtcagcctctctgggaccttggcaaaccgctgcaagaaggccccagtgaagagctgcacggagtgtgtccgtgtggataaggactgcgcctactgcacagacgagatgttcagggaccggcgctgcaacacccaggcggagctgctggccgcgggctgccagcgggagagcatcgtggtcatggagagcagcttccaaatcacagaggagacccagattgacaccaccctgcggcgcagccagatgtccccccaaggcctgcgggtccgtctgcggcccggtgaggagcggcattttgagctggaggtgtttgagccactggagagccccgtggacctgtacatcctcatggacttctccaactccatgtccgatgatctggacaacctcaagaagatggggcagaacctggctcgggtcctgagccagctcaccagcgactacactattggatttggcaagtttgtggacaaagtcagcgtcccgcagacggacatgaggcctgagaagctgaaggagccctggcccaacagtgacccccccttctccttcaagaacgtcatcagcctgacagaagatgtggatgagttccggaataaactgcagggagagcggatctcaggcaacctggatgctcctgagggcggcttcgatgccatcctgcagacagctgtgtgcacgagggacattggctggcgcccggacagcacccacctgctggtcttctccaccgagtcagccttccactatgaggctgatggcgccaacgtgctggctggcatcatgagccgcaacgatgaacggtgccacctggacaccacgggcacctacacccagtacaggacacaggactacccgtcggtgcccaccctggtgcgcctgctcgccaagcacaacatcatccccatctttgctgtcaccaactactcctatagctactacgagaagcttcacacctatttccctgtctcctcactgggggtgctgcaggaggactcgtccaacatcgtggagctgctggaggaggccttcaatcggatccgctccaacctggacatccgggccctagacagcccccgaggccttcggacagaggtcacctccaagatgttccagaagacgaggactgggtcctttcacatccggcggggggaagtgggtatataccaggtgcagctgcgggcccttgagcacgtggatgggacgcacgtgtgccagctgccggaggaccagaagggcaacatccatctgaaaccttccttctccgacggcctcaagatggacgcgggcatcatctgtgatgtgtgcacctgcgagctgcaaaaagaggtgcggtcagctcgctgcagcttcaacggagacttcgtgtgcggacagtgtgtgtgcagcgagggctggagtggccagacctgcaactgctccaccggctctctgagtgacattcagccctgcctgcgggagggcgaggacaagccgtgctccggccgtggggagtgccagtgcgggcactgtgtgtgctacggcgaaggccgctacgagggtcagttctgcgagtatgacaacttccagtgtccccgcacttccgggttcctctgcaatgaccgaggacgctgctccatgggccagtgtgtgtgtgagcctggttggacaggcccaagctgtgactgtcccctcagcaatgccacctgcatcgacagcaatgggggcatctgtaatggacgtggccactgtgagtgtggccgctgccactgccaccagcagtcgctctacacggacaccatctgcgagatcaactactcggcgatccacccgggcctctgcgaggacctacgctcctgcgtgcagtgccaggcgtggggcaccggcgagaagaaggggcgcacgtgtgaggaatgcaacttcaaggtcaagatggtggacgagcttaagagagccgaggaggtggtggtgcgctgctccttccgggacgaggatgacgactgcacctacagctacaccatggaaggtgacggcgcccctgggcccaacagcactgtcctggtgcacaagaagaaggactgccctccgggctccttctggtggctcatccccctgctcctcctcctcctgccgctcctggccctgctactgctgctatgctggaagtactgtgcctgctgcaaggcctgcctggcacttctcccgtgctgcaaccgaggtcacatggtgggctttaaggaagaccactacatgctgcgggagaacctgatggcctctgaccacttggacacgcccatgctgcgcagcgggaacctcaagggccgtgacgtggtccgctggaaggtcaccaacaacatgcagcggcctggctttgccactcatgccgccagcatcaaccccacagagctggtgccctacgggctgtccttgcgcctggcccgcctttgcaccgagaacctgctgaagcctgacactcgggagtgcgcccagctgcgccaggaggtggaggagaacctgaacgaggtctacaggcagatctccggtgtacacaagctccagcagaccaagttccggcagcagcccaatgccgggaaaaagcaagaccacaccattgtggacacagtgctgatggcgccccgcttcggccaagccggccctgctgaagcttacagagaagcaggtggaacagagggccttccacgacctcaaggtggcccccggctactacaccctcactgcagaccaggacgcccggggcatggtggagttccaggagggcgtggagctggtggacgtacgggtgcccctctttatccggcctgaggatgacgacgagaagcagctgctggtggaggccatcgacgtgcccgcaggcactgccaccctcggccgccgcctggtaaacatcaccatcatcaaggagcaagccagagacgtggtgtcctttgagcagcctgagttctcggtcagccgcggggaccaggtggcccgcatccctgtcatccggcgtgtcctggacggcgggaagtcccaggtctcctaccgcacacaggatggcaccgcgcagggcaaccgggactacatccccgtggagggtgagctgctgttccagcctggggaggcctggaaagagctgcaggtgaagctcctggagctgcaagaagttgactccctcctgcggggccgccaggtccgccgtttccacgtccagctcagcaaccctaagtttggggcccacctgggccagccccactccaccaccatcatcatcagggacccagatgaactggaccggagcttcacgagtcagatgttgtcatcacagccaccccctcacggcgacctgggcgccccgcagaaccccaatgctaaggccgctgggtccaggaagatccatttcaactggctgcccccttctggcaagccaatggggtacagggtaaagtactggattcagggtgactccgaatccgaagcccacctgctcgacagcaaggtgccctcagtggagctcaccaacctgtacccgtattgcgactatgagatgaaggtgtgcgcctacggggctcagggcgagggaccctacagctccctggtgtcctgccgcacccaccaggaagtgcccagcgagccagggcgtctggccttcaatgtcgtctcctccacggtgacccagctgagctgggctgagccggctgagaccaacggtgagatcacagcctacgaggtctgctatggcctggtcaacgatgacaaccgacctattgggcccatgaagaaagtgctggttgacaaccctaagaaccggatgctgcttattgagaaccttcggggagtcccagccctaccgctacacggtgaaggcgcgcaacggggccggctgggggcctgagcgggaggccatcatcaacctggccacccagcccaagaggcccatgtccatccccatcatccctgacatccctatcgtggacgcccagagcggggaggactacgacagcttccttatgtacagcgatgacgttctacgctctccatcgggcagccagaggcccagcgtctccgatgacactgagcacctggtgaatggccggatggactttgccttcccgggcagcaccaactccctgcacaggatgaccacgaccagtgctgctgcctatggcacccacctgagcccacacgtgccccaccgcgtgctaagcacatcctccaccctcacacgggactacaactcactgacccgctcagaacactcacactcgaccacactgcccagggactactccaccctcacctccgtctcctcccacgactctcgcctgactgctggtgtgcccgacacgcccacccgcctggtgttctctgccctggggcccacatctctcagagtgagctggcaggagccgcggtgcgagcggccgctgcagggctacagtgtggagtaccagctgctgaacggcggtgagctgcatcggctcaacatccccaaccctgcccagacctcggtggtggtggaagacctcctgcccaaccactcctacgtgttccgcgtgcgggcccagagccaggaaggctggggccgagagcgtgagggtgtcatcaccattgaatcccaggtgcacccgcagagcccactgtgtcccctgccaggctccgccttcactttgagcactcccagtgccccaggcccgctggtgttcactgccctgagcccagactcgctgcagctgagctgggagcggccacggaggcccaatggggatatcgtcggctacctggtgacctgtgagatggcccaaggaggagggccagccaccgcattccgggtggatggagacagccccgagagccggctgaccgtgccgggcctcagcgagaacgtgccctacaagttcaaggtgcaggccaggaccactgagggcttcgggccagagcgcgagggcatcatcaccatagagtcccaggatggaggacccttcccgcagctgggcagccgtgccgggctcttccagcacccgctgcaaagcgagtacagcagcatcaccaccacccacaccagcgccaccgagcccttcctagtggatgggccgaccctgggggcccagcacctggaggcaggcggctccctcacccggcatgtgacccaggagtttgtgagccggacactgaccaccagcggaacccttagcacccacatggaccaacagttcttccaaacttgaccgcaccctgccccacccccgccatgtcccactaggcgtcctcccgactcctctcccggagcctcctcagctactccatccttgcacccctgggggcccagcccacccgcatgcacagagcaggggctaggtgtctcctgggaggcatgaagggggcaaggtccgtcctctgtgggcccaaacctatttgtaaccaaagagctgggagcagcacaaggacccagcctttgttctgcacttaataaatggttttgctactgaaaaaaaaaaaaaaa

SEQ ID NO: 471 - DNA, 2105 bp, Homo sapiens
  misc_feature: Incyte ID No: 217319.7
  unsure 2095: a, t, c, g, or other
ggagccgaggaaaactgagcgtgggcctcagaaagaagttaaggcacccgcgagccgggcaactgccctccttccgcgccggcggagcgattaaagtgaagaaacaatggccagcaatcacaaatcttcagcagctcgccctgtttcaagaggtggagttgggttaacaggaaggcctccttctgggatacgacccctatcaggaaatattcgagtggcaactgcaatgccacctgggacagcaagaccaggttctcgtggttgtcccatagggactggtggagttctgtcttctcaaatcaaagttgcccatcgccctgtaacacaacaaggtttgactggaatgaaaactgggacgaaaggtccccagaggcaaattttagacaaatcttactatcttgggcttcttagaagtaaaataagtgaacttacaactgaagttaataaacttcagaagggaatagaaatgtacaatcaagagaattcagtatatttgtcatatgaaaagagggctgagactttagctgttgagataaaagagcttcaaggacaactagcagactacaacatgttggtagataaacttaataccaacactgaaatggaagaagtaatgaatgattacaatatgcttaaagctcaaaatgatcgagaaacacaaagtttggatgtcatatttactgaaagacaagcgaaagaaaaacaaatcagaagtgtcgaagaagaaattgaacaggaaaaacaagcaacagatgacattatcaaaaatatgtcttttgaaaaccaagtcaagtacctagagatgaaaaccacaaatgagaaactgttacaggaattagatacacttcaacaacaattggattcacagaacatgaaaaaagagagcctggaagcagaaatagctcactcccaggtgaaacaggaggcggtattgctgcatgaaaaactttatgagttggagtcccatcgagatcaaatgattgcagaagacaaaagcataggatctccaatggaagagagagagaaattacttaagcagattaaagatgataatcaggaaatagccagcatggaaagacagttaacagatacaaaagaaaagataaatcagtttattgaagaaattagacaacttgacatggatttagaggaacaccaaggtgaaatgaaccagaaatacaaggagctaaagaaaagggaggaacatatggacacttttattgagacttttgaggaaacaaagaatcaggaactgaaacgaaaggcacagatagaagccaacattgttgcactcttggagcactgcagtcgaaatataaatcgtatagaacagatatcctctatcaccaatcaagagctaaagatgatgcaggatgacctcaattttaaatctactgaagtgcagaaatcacaaagtacagctcagaatttgacttcagacattcaacgtctgcagttggatctgcagaaaatggagcttctagaaagtaagatgactgaagaacagcattctctaaaaagcaaaattaagcaaatgacaactgatctggagatatataatgatttgccagctttaaaatcatcaggtgaagaaaagataaagaaattacatcaggagagaatgatattatcaacccacagaaatgcctttaagaaaataatggagaagcaaaacatagagtatgaggcactaaaaacacaattgcaagaaaatgagacacattctcagcttacaaatttggagagaaagtggcaacaccttgagcaaaataattttgcgatgaaagaattcatagcaaccaagagtcaagagagtgattaccagccaattaagaaaaatgtgaccaagcagattgcagagtacaataaaaccatcgtggatgctttacatagcaccagcggaaactgagtttaagtccactgaaagtctctaaggaagtatcctcttgctgctaaacttggtacaagttgactaccaaaaaaaaaaaaagcttacttttggagtttacctaaaatttctgaatgttataatttttgtggcctcttttaagaatgatattttaaaatagtaaatagttcaataaatggtttgcanattaaaaagt

SEQ ID NO: 472 - DNA, 2661 bp, Homo sapiens
  misc_feature: Incyte ID No: 1092445.1
gaaaaaaaagcctgtgtttggagcagggagactgtcagagactttgcacaggcccaagcggagagaagaccagggatacaggtggctaagggagggcttccagctgcataagtctgtgggttgtagatggcctttctttgcctgtttcctcatctgccttccacatggggtaggtctgaggatcaaacggtacagcatagactaggcagtgaagcattcactgtactccttttgcaacagcctcatcctatttcttcaccaggggcagacactggcctcagatacctgacctggtaccctctatgaggcctgcggtgctgggctccccagaccgagcacccccagaagatgaggggcctgtcatggtgaagctagaggactctgaggaggagggtgaggctgccttatgggacccaggccctgaagctgcacgcctgcgtttccggtgcttccactatgaggaggccacagggccccaagaggccctggcccagctccgagagctgtgtcgccagtggctgcgtccagaggtacgctccaaggagcagatgctggagctgttggtgctggagcagttcctgggcgcactgccccctgagatccaggcccgtgtgcaggggcagcggccaggcagccccgaggaggctgctgccctagtagatgggctgcgccgggagccgggcggaccccggagatgggtcacagtccaggtgcagggccaggaggtcctatcagagaagatggagccctccagtttccagcccctacctgaaactgagcctccaactccagagcctgggcccaagacacctcctaggactatgcaggaatcaccactgggcctgcaggtgaaagaggagtcagaggttacagaggactcagatttcctggagtctgggcctctagctgccacccaggagtctgtacccaccctcctgcctgaggaggcccagagatgtgggaccgtgctggaccagatctttccccacagcaagactgggcctgagggtccctcatggagggagcaccccagggccctgtggcatgaggaagctgggggcatcttctccccagggttcgcgctgcagctaggcagcatctccgcaggtccaggtagtgtaagccctcacctccacgtcccctgggacctcggcatggctggcctttctggccagatccaatcaccctcccgcgaaggtggctttgcgcatgcgcttctgctccccagcgatctgaggagtgaacaggaccccacggacgaggatccctgccggggtgtgggccctgctctggtcaccacccgctggcgctcccccaggggccggagccggggccgccccagcactgggggcggggtggttaggggcggccgttgcgatgtatgtggcaaggtgttcagccaacgcagcaacctgctgaggcaccagaagatccacacgggtgagcgaccattcgtgtgcagcgagtgcggccgcagcttcagccgcagctcgcacctgctgcgccaccagcttacgcacaccgaggagcggccgttcgtgtgcggcgactgtggccagggcttcgtgcgcagcgcgcgcctggaagagcatcggagagtgcacacgggcgaacagcctttccgttgcgctgagtgcggccagagcttccggcagcgctccaatctgctgcagcaccagcgcatccacggcgatcccccgggccctggcgctaagcccccggcccctcctggtgcgcccgagcctcccggcccctttccgtgcagcgagtgccgcgagagcttcgcgcggcgcgccgtgctgctggagcaccaggcggtacacacgggcgacaagtcctttggctgcgtcgagtgcggcgagcgcttcggccgccgctcagtgctgctgcagcaccggcgcgtgcacagtggcgagcggcccttcgcctgtgccgagtgcggccagagcttccggcagcgctccaacctgacgcagcaccggcgcatccacaccggggagcggcccttcgcctgcgccgagtgtggcaaggccttccgccagcggcctacgctcacgcagcatctccgcgtacacacgggcgagaaaccctttgcctgccccgagtgtggccagcgcttcagccagcgcctcaagctcacgcgtcatcagaggacacacaccggcgaaaagccctaccactgcggtgagtgcggcctgggcttcacgcaggtctcgcggctcaccgagcaccagcgcatccacacgggcgaacggcccttcgcctgccccgagtgcggccagagctttcggcagcacgccaacctcacccagcaccggcgcatccacacgggtgaacggccctacgcatgccctgagtgtggcaaggccttccgccagcggcccacgctcacgcagcatctgcgcacccaccgacgagagaagcccttcgcctgccaggactgtggccgccgcttccaccagagcaccaagctcattcagcaccagcgcgtccacagcgccgagtagctccagccgggacgcactgtgtccgccatggtcagaacacctacctcccctggttattgtgaggctggcgattacataagtataagcaggtccgcccagggcttggctactgtaggtgtccaataaacagtagatggaaactgggtctccaccc

SEQ ID NO: 473 - DNA, 777 bp, Homo sapiens
  misc_feature: Incyte ID No: 199433.3
cgcggcagctcccaccatggcggagaccaagctccagctgtttgtcaaggcgagtgaggacggggagagcgtgggtcactgcccctcctgccagcggctcttcatggtcctgctcctcaagggcgtacctttcaccctcaccacggtggacacgcgcaggtccccggacgtgctgaaggacttcgcccccggctcgcagctgcccatcctgctctatgacagcgacgccaagacagacacgctgcagatcgaggactttctggaggagacgctggggccgcccgacttccccagcctggcgcctcgttacagggagtccaacaccgccggcaacgacgttttccacaagttctccgcgttcatcaagaacccggtgcccgcgcaggacgaagccctgtaccagcagctgctgcgcgccctcgccaggctggacagctacctgcgcgcgcccctggagcacgagctggcgggggagccgcagctgcgcgagtcccgccgccgcttcctggacggcgacaggctcacgctggccgactgcagcctcctgcccaagctgcacatcgtcgacacggtgtgcgcgcacttccgccaggcgcccatccccgcggagtgcgcggcgtacgccgctacctggacagcgcgatgcaggagaaagagttcaaatacacgtgtccgcacagcgccgagatcctggcggcctaccggcccgccgtgcacccccgctagcgccccaccccgcgtctgtcgcccaataaaggcatctttgtcgggaaaaaa

SEQ ID NO: 474 - DNA, 1716 bp, Homo sapiens
  misc_feature: Incyte ID No: 228860.6
tagacaattctttcagctagtttgagtgacgcactgaccagtgaagcgcagtgaagcagtgggaaccggaatatccaaagagtggtttgaaggagaaagaagcattgtggctttatatcctctgggcctgggtttcctgaagtcaccacacatagaggagagagaaaatggctgagttaaagtacatttctggatttgggaatgagtgttcttcagaggatcctcgctgcccaggttccctgccagaaggacagaataatcctcaggtctgcccctacaatctctatgctgagcagctctcaggatcggctttcacttgtccacggagcaccaataagagaagctggctgtataggattctaccttcagtttctcacaagccctttgaatccattgacgaaggccatgtcactcacaactgggatgaagttgatcctgatcctaaccagcttagatggaaaccatttgagattccaaaagcatctcagaagaaagtagactttgtgagtggcctgcataccttgtgtggagctggagacataaagtctaacaatgggcttgctatccacattttcctctgcaatacctccatggagaacagatgcttttacaattcagatggggacttcttgattgttccgcagaaagggaaccttctcatttacaccgagtttggcaagatgcttgtacagcccaatgagatctgcgtcattcagagaggaatgcggttcagcatagatgtctttgaggagaccaggggctacatcttggaggtctatggtgtccactttgagttacctgaccttggaccaattggggccaatggcttggccaatcctcgtgatttcttgatacccattgcctggtatgaggatcgccaagtaccaggtggttacacggtcattaataaataccagggcaagctgtttgctgccaaacaggatgtctccccgttcaatgttgtggcctggcacgggaattatacaccctacaagtacaacctgaagaatttcatggttatcaactcagtggcctttgaccatgcagacccatccattttcacagtattgactgctaagtctgtccgccctggagtggccattgctgattttgtcatcttcccacctcgatggggggttgctgataagaccttcaggcctccttattaccataggaactgcatgagtgagttcatgggactcatccgaggtcactatgaggcaaagcaaggtgggttcctgccagggggagggagtctacacagcacaatgaccccccatggacctgatgctgactgctttgagaaggccagcaaggtcaagctggcacctgagaggattgccgatggcaccatggcatttatgtttgaatcatctttaagtctggcggtcacaaagtggggactcaaggcctccaggtgtttggatgagaactaccacaagtgctgggagccactcaagagccacttcactcccaactccaggaacccagcagaacctaattgagactggaacattgctaccataattaagagtagatttgtgaagatttcttcagaatctcatgctttctggtagtattggaggagggggttggttaaaatgaaaattcacttttcatagtcaagtaactcagaacttttatggaaacgcatttgcaaagttctatggctgtcaccttaattactcaataaacttgctggtgttctgtggacgt

SEQ ID NO: 475 - DNA, 1028 bp, Homo sapiens
  misc_feature: Incyte ID No: 228860.4c
  unsure 500, 588, 1018: a, t, c, g, or other
ttcagctagtttgagtgacgcactgaccagtgaagcgcagtgaagcagtgggaacggaatatccaaagagtggtttgaaggagaaagaagcattgtggctttatatcctctgggcctgggtttcctgaagtcaccacacatagaggagagagaaaatggctgagttaaaggtcataacattcacatctgatatttcttccaaatacagactgttgttggcctgatcatcactcacacatccaggcttgttacatctccacgccactgagtatcagggaacctgccccaatattcactacatttctggatttgggaatgagtgttcttcagaggatcctcgctgcccaggttccctgccagaaggacagaataatcctcaggtctgcccctacaatctctatgctgagcagctctcaggatcggctttcacttgtccacggagcaccaataagagaagctggctgtataggattccaccttcagtttctcacaagcccttngaatccattgacgaaggcccatgtcactcacaactgggatgaagttgatcctgaccctaaccagcttagatggaaaccatttgagatnccaaaagcatctcagaagaaagtagactttgtgagtgtaagtcagtcccatccacacccttcctactgctctcctctcttctgtggtgagtgagccaaccatttgcagcctgaatgccaagcagaagcagccctatcaggaggcagcggagacaaaaccacctgcgtatgctttgggggctggcggagggatgtcttacttacagaaaccatatggcccctgacaccagagggtattcatgaactatttaatatctcagaaaggccaatgacaattgaacattttcttaagttcctttcttttggctagaacgggggcttttaacctttttctcactttgatgtctgatgtctgatgatgtctttgtttataaatatataaaataaattatataaaattacaaagaagctaatgatattgaaatataacnataaaaatac

SEQ ID NO: 476 - DNA, 279 bp, Homo sapiens
  misc_feature: Incyte ID No: 410688.3
cttctcaaggcaaagttaccataacggtggatgagtacagctcaaaccccacccaggcattcacgcactacaacatcaaccagagcagattccagcctccacatgtacatatgaaacctgccatatgaatataaaatagtgattgctgggaatcatgaactgacatttgataaggaattcatggcagaccttgttaaacaggactactaccgtttcccctctgtgtccaaattgaaaccagaggactttgacaatgttcagtccctcctgacaaacagt

SEQ ID NO: 477 - DNA, 7444 bp, Homo sapiens
  misc_feature: Incyte ID No: 347005.5
gtctcctctggatcttaactactgagcgcaatgctgagccatggagccgggttggccttgtggatcacactgagcctgctgcagactggactggcggagccagagagatgtaacttcaccctggcggagtccaaggcctccagccattctgtgtctatccagtggagaattttgggctcaccctgtaactttagcctcatctatagcagtgacaccctgggggccgcgttgtgccctacctttcggatagacaacaccacatacggatgtaaccttcaagatttacaagcaggaaccatctataacttcaggattatttctctggatgaagagagaacagtggtcttgcaaacagatcctttacctcctgctaggtttggagtcagtaaagagaagacgacttcaaccagcttgcatgtttggtggactccttcttccggaaaagtcacctcatatgaggtgcaattatttgatgaaaataaccaaaagatacagggggttcaaattcaagaaagtacttcatggaatgaatacacttttttcaatctcactgctggtagtaaatacaatattgccatcacagctgtttctggaggaaaacgttctttttcagtttataccaatggatcaacagtgccatctccagtgaaagatattggtatttccacaaaagccaattctctcctgatttcctggtcccatggttctgggaatgtggaacgataccggctgatgctaatggataaagggatcctagttcatggcggtgttgtggacaaacatgctacttcctatgcttttcacgggctgtcccctggctacctctacaacctcactgttatgactgaggctgcagggctgcaaaactacaggtggaaactagtcaggacagcccccatggaagtctcaaatctgaaggtgacaaatgatggcagtttgacctctctaaaagtcaaatggcaaagacctcctggaaatgtggattcttacaatatcaccctgtctcacaaagggaccatcaaggaatccagagtattagcaccttggattactgaaactcactttaaagagttagtccccggtcgactttatcaagttactgtcagctgtgtctctggtgaactgtctgctcagaagatggcagtgggcagaacatttccagacaaagttgcaaacctggaggcaaacaataatggcaggatgaggtctcttgtagtgagctggtcgccccctgctggagactgggagcagtatcggatcctactcttcaatgattctgtggtgctgctcaacatcactgtgggaaaggaagaaacacagtatgtcatggatgacacggggctcgtaccgggaagacagtatgaggtggaagtcattgttgagagtggaaatttgaagaattctgagcgttgccaaggcaggacagtccccctggctgtcctccagcttcgtgtcaaacatgccaatgaaacctcactgagtatcatgtggcagacccctgtagcagaatgggagaaatacatcatttccctagctgacagagacctcttactgatccacaagtcactctccaaagatgccaaagaattcacttttactgacctggtgcctggacgaaaatacatggctacagtcaccagtattagtggagacttaaaaaattcctcttcagtaaaaggaagaacagtgcctgcccaagtgactgacttgcatgtggccaaccaaggaatgaccagtagtctgtttactaactggacccaggcacaaggagacgtagaattttaccaagtcttactgatccatgaaaatgtggtcattaaaaatgaaagcatctccagtgagaccagcagatacagcttccactctctcaagtccggcagcctgtactccgtggtggtaacaacagtgagtggagggatctcttcccgacaagtggttgtggagggaagaacagtcccttccagtgtgagtggagtaacggtgaacaattccggtcgtaatgactacctcagcgtttcctggctcgtggcgcccggagatgtggataactatgaggtaacattgtctcatgacggcaaggtggttcagtcccttgtcattgccaagtctgtcagagaatgttccttcagctccctcaccccaggccgcctctacaccgtgaccataactacaaggagtggcaagtatgaaaatcactccttcagccaagagcggacagtgcctgacaaagtccagggagtcagtgttagcaactcagccaggagtgactatttaagggtatcctgggtgcatgccactggagactttgatcactatgaagtcaccattaaaaacaaaaacaacttcattcaaactaaaagcattcccaagtcagaaaacgaatgtgtatttgttcagctagtccctggacggttgtacagtgtcactgttactacaaaaagtggacaatatgaagccaatgaacaagggaatgggagaacaattccagagcctgttaaggatctaacattgcgcaacaggagcactgaggacttgcatgtgacttggtcaggagctaatggggatgtcgaccaatatgagatccagctgctcttcaatgacatgaaagtatttcctccttttcaccttgtaaataccgcaaccgagtatcgatttacttccctaacaccaggccgccaatacaaaattcttgtcttgacgattagcggggatgtacagcagtcagccttcattgagggcttcacagttcctagtgctgtcaaaaatattcacatttctcccaatggagcaacagatagcctgacggtgaactggactcctggtgggggagacgttgattcctacacggtgtcggcattcaggcacagtcaaaaggttgactctcagactattcccaagcacgtctttgagcacacgttccacagactggaggccggggagcagtaccagatcatgattgcctcagtcagcgggtccctgaagaatcagataaatgtggttgggcggacagttccagcatctgtccaaggagtaattgcagacaatgcatacagcagttattccttaatagtaagttggcaaaaagctgctggtgtggcagaaagatatgatatcctgcttctaactgaaaatggaatccttctgcgcaacacatcagagccagccaccactaagcaacacaaatttgaagatctaacaccaggcaagaaatacaagatacagatcctaactgtcagtggaggcctctttagcaaggaagcccagactgaaggccgaacagtcccagcagctgtcaccgacctgaggatcacagagaactccaccaggcacctgtccttccgctggaccgcctcagagggggagctcagctggtacaacatctttttgtacaacccagatgggaatctccaggagagagctcaagttgacccactagtccagagcttctctttccagaacttgctacaaggcagaatgtacaagatggtgattgtaactcacagtggggagctgtctaatgagtctttcatatttggtagaacagtcccagcctctgtgagtcatctcagggggtccaatcggaacacgacagacagcctttggttcaactggagtccagcctctggggactttgacttttatgagctgattctctataatcccaatggcacaaagaaggaaaactggaaagacaaggacctgacggagtggcggtttcaaggccttgttcctggaaggaagtacgtgctgtgggtggtaactcacagtggggatctcagcaataaagtcacagcggagagcagaacagctccaagtcctcccagtcttatgtcatttgctgacattgcaaacacatccttggccatcacgtggaaagggcccccagactggacagactacaacgactttgagctgcagtggttgcccagagatgcacttactgtcttcaacccctacaacaacagaaaatcagaaggacgcattgtgtatggtcttcgtccagggagatcctatcaattcaacgtcaagactgtcagtggtgattcctggaaaacttacagcaaaccaatttttggatctgtgaggacaaagcctgacaagatacaaaacctgcattgccggcctcagaactccacggccattgcctgttcttggatccctcctgattctgactttgatggttatagtattgaatgccggaaaatggacacccaagaagttgagttttccagaaagctggagaaagaaaaatctctgctcaacatcatgatgctagtgccccataagaggtacctggtgtccatcaaagtgcagtcggccggcatgaccagcgaggtggttgaagacagcactatcacaatgatagaccgcccccctcctccacccccacacattcgtgtgaatgaaaaggatgtgctaattagcaagtcttccatcaactttactgtcaactgcagctggttcagcgacaccaatggagctgtgaaatacttcacagtggtggtgagagaggctgatggcagtgatgagctgaagccagagcagcagcaccctctcccttcctacctggagtacaggcacaatgcctccattcgggtgtatcagactaattattttgccagcaaatgtgccgaaaatcctaacagcaactccaagagttttaacattaagcttggagcagagatggagagcctaggtggaaaatgcgatcccactcagcaaaaattctgtgatggaccactgaagccacacactgcctacagaatcagcattcgagcttttacacagctctttgatgaggacctgaaggaattcacaaagccactctattcagacacatttttttctttacccatcactactgaatcagagcccttgtttggagctattgaaggtgtgagtgctggtctgtttttaattggcatgctagtggctgttgttgccttattgatctgcagacagaaagtgagccatggtcgagaaagaccctctgcccgtctgagcattcgtagggatcgaccattatctgtccacttaaacctgggccagaaaggtaaccggaaaacttcttgtccaataaaaataaatcagtttgaagggcatttcatgaagctacaggctgactccaactaccttctatccaaggaatacgaggagttaaaagacgtgggccgaaaccagtcatgtgacattgcactcttgccggagaatagagggaaaaatcgatacaacaatatattgccctatgatgccacgcgagtgaagctctccaatgtagatgatgatccttgctctgactacatcaatgccagctacatccctggcaacaacttcagaagagaatacattgtcactcagggaccgcttcctggcaccaaggatgacttctggaaaatggtgtgggaacaaaacgttcacaacatcgtcatggtgacccagtgtgttgagaagggccgagtaaagtgtgaccattactggccagcggaccaggattccctctactatggggacctcatcctgcagatgctctcagagtccgtcctgcctgagtggaccatccgggagtttaagatatgcggtgaggaacagcttgatgcacacagactcatccgccactttcactatacggtgtggccagaccatggagtcccagaaaccacccagtctctgatccagtttgtgagaactgtcagggactacatcaacagaagcccgggtgctgggcccactgtggtgcactgcagtgctggtgtgggtaggactggaacctttattgcattggaccgaatcctccagcagttagactccaaagactctgtggacatttatggagcagtgcacgacctaagacttcacagggttcacatggtccagactgagtgtcagtatgtctacctacatcagtgtgtaagagatgtcctcagagcaagaaagctacggagtgaacaagaaaaccccttgtttccaatctatgaaaatgtgaatccagagtatcacagagatccagtctattcaaggcattgagaatgtacctgaagagctcctggataaaaattattcactgtgtgatttgtttttaaaaacttgcttcatgccctacagaggtgccagctatttctgttgatactatgtataatttattaatctggagaatgtttaaaattttatataatttaaaggtaacagatattattgtacatagttgtattttgtagtttcttctgtaaatatgtatttttcataatgtttaatattaagctttatataatactatttttccacactaaagtgttcatgacttgttctacataaaactaattcaacctgtatgacaggactactggtaaaatgcatatggaggtggtggcagagacaatccttcaggccatgttttctacctgttttgatattcactggacaggaaaaagggcagggctagagagagcaaatactatggctagatttgctgcattgctgtcccatgaatctcgagagccaacagacatgtcctaacttgctattaggacaaatgtgacagtcaaaaaaaggattagagggagggagaaaaaagaattaagcagtaccaaagctgaactagatgcttgtgtctgaactagttgctctctctctcctttctccttccagggattcaagccaaagtggtcagctcagggatcatgtaacttgcagtgcaagcccaggatggtaggatgcagggttgagggttctgatagagaatgattccaaacagaagtgatgaattccttttgttaataagatgccagctatacccagactggaaacataacatgcaaagcactatctacagtgattagagatcctttcattgcattcatggtgtggagtgtgaacatccacacccatactgtaatgtatttatacacactagtttctgtctcattttcagtggtctccattcctagaaaagtcacaattatccattcctacttgatttcccattaaaagaatattatggtagcagattgtgcccctcattaaaaggcttaatgccaacattttcatagaaatgactacaaacatcatatatagtaaatttaaaaacaatagcaaaaacaaaaacagtggtcttcagtaaaattttcaaaacttcttttagtaaatcaatgaagtcaaaatgtcaagtaatcacccaaagttgcatttaataacaaaaggcactacatactgtaccaagtttatcttcaatatttgtgccttacttactttgactataacaaattccaatgagtcagaaagtatttccttcatcaaggtccagttccgacagcattcctgggaaaaatttgaaaggagtttgtacggaatcttcatagatacctgagaagatgagctggagatgtttgcctttttcacactacaaatttttctgtaataaacttgggaattagaggtcaaaaaaaaa

SEQ ID NO: 478 - DNA, 975 bp, Homo sapiens
  misc_feature: Incyte ID No: 334621.13
cagagatggcccctcgacctcctgttcctcccaaggcactaggggaggaggtgggctcttgcctaagtctcaggatgcctggctccttcctacctgtcaacgtggttggtggtcatgaacacgatgcgggcctcggtggaagccacaccatccaaggcattgagcagtccactgaaggtgaggcgacctaggccttggtactttactgggtctggaggaaggcaaagataaggaagcatgagtagtcatagcccagcataaaattagcatgccccactatgttcccctacttatccatgtgtcttgtgggctcttgtcactaacccaggcatcttccaccagccctctggatttctgctttcttcccctgttccacagttacccactccacttcctccagaacccctcacttactctccacagccaagtctcgactgagaaaagcagcatccacatcctccaggagtaccaggctctgctgcggggccacgctcagcaggtggttgagtcggtcatcagagaggctggagtccgtgaggctcagcaggcagatgctgtgctccagttccccagccagggctgtgctatggagcatgggatggcaggaggtagcaggcaacctggaaatgcttcctcaggcccagctactctcctcaccgcctggggacatgtgtctcagaggcctgacttctacctcacaccctgatgttccacacgtttcatgtttatcctggtccccgatccccagattcatttccccttccaaccctatcagcctagtgtttccacaaaggcttcgttttgccaagttgagagaaattttgaatactcacataaaactgctctttccgcaaccagggggcccataaagcaggtagccacgtctgtaaggaatgcctagggatagagccaggatgatcatgtcttttgccccggatatctacgttcattcccagccctgccccctggaagcct

SEQ ID NO: 479 - DNA, 851 bp, Homo sapiens
  misc_feature: Incyte ID No: 028180.1
  unsure 340, 834: a, t, c, g, or other
tatctccattttccagttaggtagagccaagttgaggaatccttttaagattattagaaaacatgccctgaagagagttgttcttaggttacacatgaaatcctaccgtcactagcccccatacaccagtgttgctggctgaagatacccgcttaaggatgctaacatttaccctggtactgccacattttctctagagcagctggcccttcttgctacagccctatcccccctccttgcttctgtgaaatggggagacaaagcacttttgctctccaaagcacttttggatactcaggaggaaagataagatacatgtttgaagtattcaatcataggngcaaagaacttgcaaaatatgaagtgacttggaattaaccatgttgtagcctaacgtgctactgcatttctaaatcatcaatatttgcttgtctttgcccctagactctagactatgttaactagttaaggatgttacattttgaaaggatgtatgttagatatattatttgcggcaagaagttcattctgtgcaatatggacatgtttgcaaaccataccaagggtcaggttgttgtacacttacagtacgtgtcaaccataatggaacatccacaaatgcatcaattataccagggatgtatagtaagtcagggaactaatataaatgatgacagtcatggctgcactgctacttgtgctgtcgttttgtttgtttttctatgataatttaaaatacataggtagggctactgaggaaatttggagagccacattctgtggtttctcattatacttacttcctgcatttagagggagtttatttaaaagaantaaatgacaatcaaacc

SEQ ID NO: 480 - DNA, 1080 bp, Homo sapiens
  misc_feature: Incyte ID No: 252570.6c
gctgcttcctagaaggtaatgtacgaactcgtctccaaaggatacttaggttgcaccagtgtatttgtaaaacaggagcaaatttggaccttgccgggccaaagtcgtgtcacgtggaacctcttaatctcagcatccggagctccaggaagggaaaatttcaagtcagatagaattctatatataccatttctttggaaccttcagccctcaagattccaacatcatgacctcagtttcaacacagttgtccttagtcctcatgtcactgcttttggtgctgcctgttgtggaagcagtagaagccggtgatgcaatcgcccttttgttaggtgtggttctcagcattacaggcatttgtgcctgcttgggggtatatgcacgaaaaagaaatgggacagatgtgactttgaaaggcctactgagtcaaacctcaccctgaaaacctttgcgctttagaggctaaacctgagatttggtgtgtgaaaggtccaagaatcagtaaataagggagtttcacatttttcattgtttccatgaaatggcaacaaacatacatttataaattgaaaaaaaaatgttttctttacaacaaataatgcacagaaaaatgcagcctataatttgctagttaggtagtcaaagaagtaagatggctgaaatttacataagtaatatttcataatcttagaattctctcaaagcatgtgaaataggaagaaggaagttcttgcccagaatcttaggaaatcaccactgttcggttataatcactgcctcctgaatcgttgaggagtcttttaaattagatttttgttttgttgtctcccaagttaatattatatttagatatcagagagtcaggcaaaaaggaaaacttttatctctagggaaaaaacatttagaaaaatgtattcagtgtatctaatactgaaatgcggaaaaaaatttaatgttaaaaaaaaactatagacattgacatggaaaagagatttaatgttttgaaaaaaaactttatattaactgagtaacatcctcctgatgagaagtactatattaaatataaacccattatgttat

SEQ ID NO: 481 - DNA, 3363 bp, Homo sapiens
  misc_feature: Incyte ID No: 466402.116
cgcgccagagagaagcagcctccggccccggcggcccctgtctcccgaccccggaaggcgaagcaggctgcccggggaccccgcgcgtgggcgcttgaagccgagaccagcctgcccgggcctgggcaggcggagcagggccttggaccccgcggcgcccctcggcctcggagcaacgagcgcagcgccgcctctgaagagccaatccattcaggatgggaaaccacgcaggcaaacgagaattaaatgccgagaaggccagtacgaatagtgaaactaacagaggagaatctgaaaaaaagagaaacctgggtgaactttcacggacaacctcagaggacaacgaagtgttcggagaggcagatgcgaaccagaacaatgggacctcctctcaggacacagcggtgactgactccaagcgcacagcggacccgaagaatgcctggcaggatgcccacccagctgacccagggagccgcccccacttgatccgcctcttttcccgagatgccccggggagggaggacaacaccttcaaagacaggccctctgagtccgacgagctccagaccatccaagaagacagtgcagccacctccgagagcctggatgtgatggcgtcacagaagagaccctcccagaggcacggatccaagtacctggccacagcaagtaccatggaccatgccaggcatggcttcctcccaaggcacagagacacgggcatccttgactccatcgggcgcttctttggcggtgacaggggtgcgcccaagcggggctctggcaaggtgagctctgaggagtagaggagttttagtttaaatggaaaaagcaaaggagaaatcagtaggtgaactcagccattagaggaagaactggcacgtagcctcttgctgtctaaggtctcgttccgtgctggagaatgcatatgagcccaagagtgtgggcctgagtggctgcttaggacgttttcgtttaactcaccccctcttttcctcacaagggatggtggccggggtgtggctcaggaatgtaaggacatgctgaattctggatctctaagggtgcctggacatgggcgttgcagaaagagagccacattctcagggtctctggtggtgtgtgcttgcggacttgatgactgatgttgcctctgcagcccacacgctggggttcaacactgggttatgctcgttttttcctggagtcagtgctgctagcttcatgttgctctgcgacaatcataggattgaggtcgaggaagacttttgaacaaactcctcaatttaaatccgccttgagcaaacgttctctgtggtctgagaagtggaaggggggagggataaatgagtgtctatgaatcaaagctttattatcttgtgattccattaatttgcatacagagtcttagaagtttctttattcaaaagcaaatgtggataaaaatgtattacaaaaaaaaaaaaactctgctatggggtccagagtctaggagtggtttctgcagttgattgtcagtggagaacctgtggctgctggttcatcaaagcgctggtccctgagtgccattcagattgcagatgcagtatttaacgtgatgtttagagtgtttggtggttgtgtaattttggagagaaagaagtttttcccaaaaaagtccctagtttattgggtgttctcacacaacctgtaagatgaagctgtttttctgcctgtgtgcagggctgattctggaattccagaaggccttgtgggagcgtaaaaggcttttgaataaagtgtggaacagagcgcctcattctgataacatgcaatcataaaaaccatagggcaacttggagttaaggagtttctagaatttgctttagtctccaactgcaattctttattgatcatgaaattgttgaagagaaacacaaatgtcagttttacctttcctgtgggcgtgaaagcacatcaaagtttcaggcaactgttaacatctctaccatctgtctgagttgagatttcaggttgtgacacttgccgtgacttatttgtaaatgacattttgtgtgtcttagatactaatggaattcatattctggctagttctttcagtgcatttgtagacatgttcttttcctttgtagcagtcctccctcaccctgaaatgttggtgttctaaccgatttctaatgctaatttcaactggaagcactttttcaagcccagctatcaaaccacaccagacatgtatggattcgggttgcccaataaagcgttgctattatgtaagcatccctcacgcatacagcatcaccagttttgaaagcttgaactattctgcttacttcaaggtacagaaaaaaaaaatgtacttaaactgtgcagaaaagatgaaatcactggataatatgtattataaaataagcttcatgtgagtgacactggtttaagttgaaataaaatggtgaaagcattgatatcaatcattgtgactttatctcaaaacaatattgacacacatagatgtttttcttcctttatggtaagattacagcctttattgtcttaaatctcttatactcttcaatattttcaaagaaaacattctagtctcagaaatagtccatctctttggcaaaacagggctggccaattatcaaggacccataaaaatcaaaacactttcaaaaattttaaaaataaaaataattttcacatgattgctttaggaattttgaagtatccattcttttcactatggagtgttgaatatagaagattttttaatgaacaggcttgccctttgatgccaaaggcaaaaaataataataataacatttgcacgtgtgatcacagagcagctgtgaggcatcccgggggagcgcacgcagtggggatgtgattgctccactcaactattttatcacaaagtgttgtaaacatgggagatgaaagcttaactctctctacacccagctacagacccgcaatggccctaaaaatctggggtattcattgggtgggctgccatggaggaatttttggttttgtttttatttttatttgttgttctgtttacaaatcaggagagcccctgtttttatatgctaggaaggtccttgggataggccgaagaggtgtgcaaacgagcagtggaaggcccgggccctgtctctcaggaccacggcggcctgccccacacacagttctgcttctccctatctagaacgaggttttcctggcagattcctgccagactctgagtggagcccccccatgaccctataaaaggggctgtttgtcctcctcccaccctcctgtgctcttcctccctccccttgagggcacatggccgctggtaccacatgttgg

SEQ ID NO: 482 - DNA, 6378 bp, Homo sapiens
  misc_feature: Incyte ID No: 1096160.26c
  unsure 4198, 6347: a, t, c, g, or other
agcatccggagcggagctgcagcagcgccgccttttgtgctgcggccgcggagcccccgagggcccagtgttcaccatcataccaggggccagaggcgatggcttgcctccatgagacccgaacaccctctccttcctttgggggctttgtgtctaccctaagtgaggcatccatgcgcaagctggacccagacacttctgactgcactcccgagaaggacctgacgcctacccatgtcctgcagctacatgagcaggatgcagggggcccagggggagcagctgggtcacctgagagtcgggcatccagagttcgagctgacgaggtgcgactgcagtgccagagtggcagtggcttccttgagggcctctttggctgcctgcgccctgtctggaccatgattggcaaagcctactccactgagcacaagcagcagcaggaagacctttgggaggtcccctttgaggaaatcctggacctgcagtgggtgggctcaggggcccagggtgctgtcttcctggggcgcttccacggggaggaggtggctgtgaagaaggtgcgagacctcaaagaaaccgacatcaagcacttgcgaaagctgaagcaccccaacatcatcactttcaagggtgtgtgcacccaggctccctgctactgcatcctcatggagttctgcgcccagggccagctgtatgaggtactgcgggctggccgccctgtcaccccctccttactggttgactggtccatgggcatcgctggtggcatgaactacctgcacctgcacaagattatccacagggatctcaagtcacccaacatgctaatcacctacgacgatgtggtgaagatctcagattttggcacttccaaggagctgagtgacaagagcaccaagatgtcctttgcagggacagtagcctggatggcccctgaggtgatccgcaatgaacctgtgtctgagaaggtcgacatctggtcctttggcgtggtgctatgggaactgctgactggtgagatcccctacaaagacgtagattcctcagccattatctggggtgtgggaagcaacagtctccatctgcccgtgccctccagttgcccagatggtttcaagatcctgcttcgccagtgctggaatagcaaaccacgaaatcgcccatcattccgacagatcctgctgcatctggacattgcctcagctgatgtactctccacaccccaggagacttactttaagtcccaggcagagtggcgggaagaagtaaaactgcactttgaaaagattaagtcagaagggacctgtctgcaccgcctagaagaggaactggtgatgaggaggagggaggagctcagacacgccctggacatcagggagcactatgaaaggaggctggagagagccaacaacctgtatatggaacttaatgccctcatgttgcagctggaactcaaggagagggagctgctcaggcgagagcaagctttagagcggaggtgcccaggcctgctgaagccacacccttcccggggcctcctgcatggaaacacaatggagaagcttatcaagaagaggaatgtgccacagaagctgtcaccccatagcaaaaggccagatatcctcaagacggagtctttgctccctaaactagatgcagccctgagtggggtggggcttcctgggtgtcctaagggccccccctcaccaggacggagtcgccgtggcaagacccgtcaccgcaaggccagcgccaaggggagctgtggggacctgcctgggcttcgtacagctgtgccaccccatgaacctggaggaccaggaagcccagggggcctaggagggggaccctcagcctgggaggcctgccctcccgccctccgtgggcttcatcatgacctcctgctccgcaaaatgtcttcatcgtccccagacctgctgtcagcagcactagggtcccggggccggggggccacaggcggagctggggatcctggctcaccacctccggcccggggtgacaccccaccaagtgagggctcagcccctggctccaccagcccagattcacctgggggagccaaaggggaaccacctccctccagtagggcctggtgaaggtgtggggcttctgggaactggaagggaagggacctcaggccggggaggaagccgggctgggtcccagcacttgaccccagctgcactgctgtacagggctgccgtcacccgaagtcagaaacgtggcatctcatcggaagaggaggaaggagaggtagacagtgaagtagagctgacatcaagccagaggtggcctcagagcctgaacatgcgccagtcactatctaccttcagctcagagaatccatcagatggggaggaaggcacagctagtgaaccttcccccagtggcacacctgaagttggcagcaccaacactgatgagcggccagatgagcggtctgatgacatgtgctcccagggctcagaaatcccactggacccacctccttcagaggtcatccctggccctgaacccagctccctgcccattccacaccaggaacttctcagagagcggggccctcccaattctgaggactcagactgtgacagcactgaattggacaactccaacagcgttgatgccttgcggcccccagcttccctccctccatgaaagccactcgtattccttgtacatagagaaatatttatataaattatatatatatacatatatatatatatatgcgccacataatcaacagaaagatggggctgtcccagccgtaagtcaggctcgagggagactgatcccctgaccaattcacctgataaactctagggacactggcagctgtggaaatgaatgaggcacagccgtagagctgtggctaagggcaagccccttcctgccccaccccattccttatattcagcaagcaacaaggcaatagaaaagccagggttgtctttatattctttatccccaaataatagggggtggggggaggggcggtgggaggggcaggagagaaaaccacttagactgcacttttctgttccgtttactctgtttacacattttgcacttgggaggagggaggctaaggctgggtcctcccctctgaggtttctcaggtggcaatgtaactcatttttttgtcccaccatttatcttctctgcccaagccctgtcttaaggcccagggggaggttaggagactgatagcatgtgatggctcaggctgaagaaccggggtgctgtttaagtccctgcttttatcctggtgcctgattggggtggggactgtcctactgtaacccctgtgaaaaaccttgaaatataacactccatgcaggcccagctgttgagggttttcttgatgaatgaatggggtaccatacatggttaagataaagccttgggctccggactttatctgaggtgtctggagaagttctcctgcccctccacttttttgcatctactctcactaaatgagtataatgtcaagccccaactttctaaaattataggaataaatggtagcagatacatccttctaacttgttatggaggactataaatgaagttactaaaaacaatagactgaaatttttagtttaaaatatgcaagcctgaacaaggggaccaacattcccaagaaactggaacccagtcagacatatgatcaactgcttaatgtgtatgccatgtatgtcatgtgtcattcctttcccccaccccctccctagtggaagtgcttgcctactcccctaggacaggtaagtcctcggaaagtctaatcctcaatcttttgggcacaagttttataagggccaaccaagcatggagtcagggaaaaataggatcgagggccacaaaaaaagatggaagtggtaaaatagaagaaaacatcttaaccggaataaaggcttccattcaaaacccaagaagggtcctttgagggataaaaggtacaaaaataacagcaagacaagaggaataaaacccacatgaatcactgtggcatccagtttctattcacaaagaaaaagctccagtccatcttttaatttttttgaaaaattcctgacattacagaactaaactgaaatgtattaatattccactcttacatttccatgacaaacagaaaaattcatgagccaaaaaaaaaaaaccaaaaaanaaaaaaaaccagggagaagcttataaaactaaatatggatctcagcatcaacagctgaacagagaaaggaattaaaacgctttaattaaaaaatcacgagtggatgataaagtgtgtagaaactgaaaatttacaaactatttaaaacctggaatcgctgactgttcagaaactacacagatggatcatgggtggtggtgaacagcagaaagggattatggatgaatctgcattgttctagctgctccccatgccacccgtctccgaggaaagcctgacattgattagatattgagccaggctaatgctggcagcagatccagtgatggtaacctgcctatcagtagatccttccactgggttcgcaattttgatctgcgccccagacatctgacggatctcattgattttggcgccttgacgcccgattatgcagccaatcaaatcgtttggaatggtgagttcatgagaagtagtctgagcagatgcatccaaacctgcccaatagcctttcacctctggagagctggattcaatgccactgaatccggtgttgccatgcgtcatgggaaaatgagactgttgcattgccaactggtgcagcttggtcaaatctggctgtggaatggcatactgtccttgaatggtataggcctctagaggtggtccctccaggtcagggttgaggcacatggacggggtggtgtggggaaagctcgcactgtcgctgcctgtgctgtacctgtcctgaccacctgcaaagatgaccggagagctggacggcttgggccggtacgggatggtcacgcccttcgggggggactccaacatgaccacgcagatctgtttgacacactcaatgatggattgtggaatgccagcaatagtgatggcccgctcagttgagttgggtagcatatcccctgccacctggacctgagcccctgtactctctcgtatttccttgatcttgcatccaccttttccaatgagagagccacactgactagcagggaccaccagcctcagggtgaccgggggtctactggcagctgtgctattggtcatagagctgcttatgtcctcttccagtttgtcaatgatcatagcaaaggctttgaagatggcattagtgggtccagccaaagtgataattctctcaggacaattcccttctgagatgttgatacgtgcaccactctcctcgcgcatcttcttaactgattctcctttctttccgatgatactgccaacttcctttccatgcataagtagccggatggtgagagtgacatttaatccaccttcaatcacaccggtgtccatgtcgagcagtgttctggggagctggactttgagtggtcaagtctttggtcactggttgggggtgaaagccaaaaactaaaatgcaaacatgaccaaaatcagaggaggaaaacaacaaggttattatttcccaagttattttcaccttatcaatattttctactttacacttttccttaaatgacagtatgtcagacttatatacacaccaagcacaactgcatgacaaaatatacagctcaggttctgttacacagtatagaaggcaactttccagttcctctcattaatgacagggtttccgctgactctcaggatgaacaaggttctttcaattggcaatggttctaaggaaactgctgaacgtgcaccacttgtccttcagcagaaaaagcttcaaagaattcagaaacacctggaaatcatgagtgcaaatctccaactacagcgagggcaaatgaccttttgtttccctgctgggcagcagtttaagttgaaaactagagagaacacatgtaaattttctttgtagtagcaatttgtagataaggaaattgagatgtatcccacattacaaatttcaaccgttgatggctaacaccaaatgatttctaaaagatttagatcaacaccctcactgaaaaggcattatctgagatgccttccacgcaggctggggttccatattcccctttagaaaatgactcgatacattaagtacacttgagtctttttctcctattcctccttccaacccaacttgttactcagatttgagatgttttccttgcttttgtgtttaccatccagtttttatttcaantctattaaatcttaaatttccttccaaagaa

SEQ ID NO: 483 - DNA, 1279 bp, Homo sapiens
  misc_feature: Incyte ID No: 899612.2
ggtttgaccaggctgcacccacgaattctgttttcttttagaggtcactggagagcccggtggggtgtaagtacactgcgcttataaaactctagcaggaagctagcagctgtctccaaacccagagaaggggaaacaggaatcgattaggaataaaggattataatccactttccttctgaggaaaagctgggaaccttctcattttgccttatgaaaactaagctgaatcgactgctgccaaacatctattaggcaaaattggcctcttgcccatgatttgactttccagcacagccagttctttttctcctctgcagctgattggctctggagtgtggccagaagcctctctcctgcaattaaaggagtcgggtctctaactgttgatctgtttttttcccttctgagcaatggagcttaccatctttatcctgagactggccatttacatcctgacatttcccttgtacctgctgaactttctgggcttgtggagctggatatgcaaaaaatggttcccctacttcttggtgaggttcactgtgatatacaacgaacagatggcaagcaagaagcgggagctcttcagtaacctgcaggagtttgcgggcccctccgggaaactctccctgctggaagtgggctgtggcacgggggccaacttcaagttctacccacctgggtgcagggtgacctgtattgaccccaaccccaactttgagaagtttttgatcaagagcattgcagagaaccgacacctgcagtttgagcgctttgtggtagctgccggggagaacatgcaccaggtggctgatggctctgtggatgtggtggtctgcaccctggtgctgtgctctgtgaagaaccaggagcggattctccgcgaggtgtgcagagtgctgagaccgggaggggctttctatttcatggagcatgtggcagctgagtgttcgacttggaattacttctggcaacaagtcctggatcctgcctggcaccttctgtttgatgggtgcaacctgaccagagagagctggaaggccctggagcgggccagcttctctaagctgaagctgcagcacatccaggccccactgtcctgggagttggtgcgccctcatatctatggatatgctgtgaaatagtgtgagctggcagttaagagctgaatggctcaaagaatttaaagcttcagttttacatttaaaatgctaagtgggagaagagaaaccttttttttggggggcggttatttttggtttgtatgttggttttt

SEQ ID NO: 484 - DNA, 4595 bp, Homo sapiens
  misc_feature: Incyte ID No: 254107.1
ggatccagctgtctctccttgcgatcctgtcttcggggaagtccacgtcctaggcaggtcctcccaaagtgcccttggtgccgatcacccctcccagcgtcttgcaggtcctgtgcaccacctcccccactccccattcaaagccctcttctctgaagtctccggttcccagagctcttgcaatccaggctttccttggaagtggctgtaacatgtatgaaaagaaagaaaggaggaccaagagatgaaagagggctgcacgcgtgggggcccgagtggtgggcggggacagtcgtcttgttacaggggtgctggccttccctggcgcctgcccctgtcggccccgcccgagaacctccctgcgccagggcagggtttactcatcccggcgaggtgatcccatgcgcgagggcgggcgcaagggcggccagagaacccagcaatccgagtatgcggcatcagcccttcccaccaggcacttccttccttttcccgaacgtccagggagggagggccgggcacttataaactcgagccctggccgatccgcatgtcagaggctgcctcgcaggggctgcgcgcagcggcaagaagtgtctgggctgggacggacaggagaggctgtcgccatcggcgtgcctgtgcccctctgctccggcacggccctgtcgcagtgcccgcgctttccccggcgcctgcacgcggcgcgcctgggtaacatgcttggggtcctggtccttggcgcgctggccctggccggcctggggttccccgcacccgcagagccgcagccgggtggcagccagtgcgtcgagcacgactgcttcgcgctctacccgggccccgcgaccttcctcaatgccagtcagatctgcgacggactgcggggccacctaatgacagtgcgctcctcggtggctgccgatgtcatttccttgctactgaacggcgacggcggcgttggccgccggcgcctctggatcggcctgcagctgccacccggctgcggcgaccccaagcgcctcgggcccctgcgcggcttccagtgggttacgggagacaacaacaccagctatagcaggtgggcacggctcgacctcaatggggctcccctctgcggcccgttgtgcgtcgctgtctccgctgctgaggccactgtgcccagcgagccgatctgggaggagcagcagtgcgaagtgaaggccgatggcttcctctgcgagttccacttcccagccacctgcaggccactggctgtggagcccggcgccgcggctgccgccgtctcgatcacctacggcaccccgttcgcggcccgcggagcggacttccaggcgctgccggtgggcagctccgccgcggtggctcccctcggcttacagctaatgtgcaccgcgccgcccggagcggtccaggggcactgggccagggaggcgccgggcgcttgggactgcagcgtggagaacggcggctgcgagcacgcgtgcaatgcgatccctggggctccccgctgccagtgcccagccggcgccgccctgcaggcagacgggcgctcctgcaccgcatccgcgacgcagtcctgcaacgacctctgcgagcacttctgcgttcccaaccccgaccagccgggctcctactcgtgcatgtgcgagaccggctaccggctggcggccgaccaacaccggtgcgaggacgtggatgactgcatactggagcccagtccgtgtccgcagcgctgtgtcaacacacagggtggcttcgagtgccactgctaccctaactacgacctggtggacggcgagtgtgtggagcccgtggacccgtgcttcagagccaactgcgagtaccagtgccagcccctgaaccaaactagctacctctgcgtctgcgccgagggcttcgcgcccattccccacgagccgcacaggtgccagatgttttgcaaccagactgcctgtccagccgactgcgaccccaacacccaggctagctgtgagtgccctgaaggctacatcctggacgacggtttcatctgcacggacatcgacgagtgcgaaaacggcggcttctgctccggggtgtgccacaacctccccggtaccttcgagtgcatctgcgggcccgactcggcccttgcccgccacattggcaccgactgtgactccggcaaggtggacggtggcgacagcggctctggcgagcccccgcccagcccgacgcccggctccaccttgactcctccggccgtggggctcgtgcattcgggcttgctcataggcatctccatcgcgagcctgtgcctggtggtggcgcttttggcgctcctctgccacctgcgcaagaagcagggcgccgccagggccaagatggagtacaagtgcgcggccccttccaaggaggtagtgctgcagcacgtgcggaccgagcggacgccgcagagactctgagcggcctccgtccaggagcctggctccgtccaggagcctgtgcctcctcacccccagctttgctaccaaagcaccttagctggcattacagctggagaagaccctccccgcaccccccaagctgttttcttctattccatggctaactggcgagggggtgattagagggaggagaatgagcctcggcctcttccgtgacgtcactggaccactgggcaatgatggcaattttgtaacgaagacacagactgcgatttgtcccaggtcctcactaccgggcgcaggagggtgagcgttattggtcggcagccttctgggcagaccttgacctcgtgggctagggatgactaaaatatttattttttttaagtatttaggtttttgtttgtttcctttgttcttacctgtatgtctccagtatccactttgcacagctctccggtctctctctctctacaaactcccacttgtcatgtgacaggtaaactatcttggtgaatttttttttcctagccctctcacatttatgaagcaagccccacttattccccattcttcctagttttctcctcccaggaactgggccaactcacctgagtcaccctacctgtgcctgaccctacttcttttgctcttagctgtctgctcagacagaacccctacatgaaacagaaacaaaaacactaaaaataaaaatggccatttgctttttcaccagatttgctaatttatcctgaaatttcagattcccagagcaaaataattttaaacaaaggttgagatgtaaaaggtgttaaattgatgttgctggactgtcatagaaattacacccaaagaggtatttatctttacttttaaacagtgagcctgaattttgttgctgttttgatttgtactgaaaaatggtaattgttgctaatcttcttatgcaatttccttttttgttattattacttatttttgacagtgttgaaaatgttcagaaggttgctctagattgagagaagagacaaacacctcccaggagacagttcaagaaagcttcaaactgcatgattcatgccaattagcaattgactgtcactgttccttgtcactggtagaccaaaataaaaccagctctactggtcttgtggaattgggagcttgggaatggatcctggaggatgcccaattagggcctagccttaatcaggtcctcagagaatttctaccatttcagagaggccttttggaatgtggcccctgaacaagaattggaagctgccctgcccatgggagctggttagaaatgcagaatcctaggctccaccccatccagttcatgagaatctatatttaacaagatctgcagggggtgtgtctgctcagtaatttgaggacaaccattccagactgcttccaattttctggaatacatgaaatatagatcagttataagtagcaggccaagtcaggcccttattttcaagaaactgaggaattttctttgtgtagctttgctctttggtagaaaaggctaggtacacagctctagacactgccacacagggtctgcaaggtctttggttcagctaagctaggaatgaaatcctgcttcagtgtatggaaataaatgtatcatagaaatgtaacttttgtaagacaaaggttttcctcttctattttgtaaactcaaaatatttgtacatagttatttatttattggagataatctagaacacaggcaaaatccttgcttatgacatcacttgtacaaaataaacaaataacaatgtgctctcgggttgtgtgtctgttcacttttcctccctcagtgccctcattttatgtcattaaatggggctcacaaaccatgcaaatgctatgagatgcatggagggctgccctgtaccccagcacttgtgttgtctggtgatggcaccatctctgattttcaaagctttttccagaggctattattttcactgtagaatgatttcatgctatctctgtgtgcacaaatatttattttctttctgtaaccataacaacttcatatatgaggacttgtgtctctgtgcttttaaatgcataaatgcattataggatcatttgttggaatgaattaaataaacccttcctggggcatctggcgaatcccagctg

SEQ ID NO: 485 - DNA, 2697 bp, Homo sapiens
  misc_feature: Incyte ID No: 208328.1
  unsure 1547-1579: a, t, c, g, or other
ctcgagccgctcgagccgggccccttgtctgcagagatggctcccaatgcttcctgcctctgtgtgcatgtccgttccgaggaatgggatttaatgacctttgatgccaacccatatgacagcgtgaaaaaaatcaaagaacatgtccggtctaagaccaaggttcctgtgcaggaccaggttcttttgctgggctccaagatcttaaagccacggagaagcctctcatcttatggcattgacaaagagaagaccatccaccttaccctgaaagtggtgaagcccagtgatgaggagctgcccttgtttcttgtggagtcaggtgatgaggcaaagaggcacctcctccaggtgcgaaggtccagctcagtggcacaagtgaaagcaatgatcgagactaagacgggtataatccctgagacccagattgtgacttgcaatggaaagagactggaagatgggaagatgatggcagattacggcatcagaaagggcaacttactcttcctggcatcttattgtattggagggtgaccaccctgggcatggggtgttggcaggggtcaaaaagcttatttcttttaatctcttactcaacgaacacatcttctgatgatttcccaaaattaatgagaatgagatgagtagagtaagatttgggtgggatgggtaggatgaagtatattgcccaactctatgtttctttgattctaacacaattaattaagtgacatgatttttactaatgtattactgagactagtaaataaatttttaaggcaaaatagagcattcaaagccagcttggaatttaattctgtcttgataccttgttatttatgcaaaaactcctatctcctttcctttatgacaagagagtaagttttaggttgggatccatgttctactgatttctgtatttctgtctttgttaagtccagtgctttatttatatcactcaataatggttgaaccaaattgaatttctacttatagagcatagtgaaatgatattttataaaatgaattagttgctctgacatgatcacaatcaaattactaaacattttagaaactaaattaaactccttcccccctcttctcctttaaagctatttgtatgaaatgaagtctggcaccatgcccccttttattctctatgtctcacacccaactaaaatagttattatttctggggatgatggtgggcaaggaaaggtattttccacagggatctagcaattctgtttaactagtggggattcctaggggtagatggacattgggagcgaacaaactttctaaagctgggggactgtggaccaccctctctcctacctgccttagggtctagcaggtcttctccaggatgagggcgccagtctgggtgagggtgggtgaggagctggcttctgggttgacctcaatattctgctcaggttctgctgattgagcattttcctctcttctttttttcacgaggagatccctgttcctgtcttgagaacttgagtcccttcctccatcttcctccctccatttactcnnnnnnnnnnnnnnnnnnnnnnnnnnnnnnnnnatgactcactactgatcacctgtgagtttttttcacgggctgagacgtgcccgccttcttccacactcatcctagttccttgtttctttaaaacttgctcaagaaccaactcctgcaggggggtttccagtcttaaccccactcagcaaaattcaccaccatttatgggctttcctcatcacatttatgggtgaaatgccccggggagggcactggtcatctggccaggtctgcactaagttggactgatttctgagaatagagtccatggtcgctttttctggatgtaccctctcctgcagggtagggactatgattttcttgtcaacttgagacttctgattgcagagaaccaagaggtcttccatggtcttccatcagatagggaggaagctaaaggcgagcatcacgtccatcattttccctgcgcgtggagttgtgaggggtaggttttccttccctaaacctgagtatatagaggatttagggatttttccctcaagaactaaacatttcctcacgggaggaaaacatatcccccattggactccttaggacaaatcttgcagattatcatacaaaaatgaacagcctgaagtctaaactgactcactaaggggtatttccatccttgggttctggcttaatactttctcccctccccaactactcactgcccagcctggcctctccccagactccgcagcagcctcctcgctgcccccttcactttcttattcctgagggtgtagatgagcgggttgagagcaggtgtgaccacggtgtagaagagcgatacgaacttgccccgtgcctggttgtagcgctgcgcgggctgcaggtaggtgtagatggccgagccgtagaacaggcagacggctgtcaggtgggacccacacgtgcccaccgccctcctccggcctccgctgaaccgcatgcaacagacagctcgggccacggcaccgtaggaggccaggatgacggcaaacggcagcagcaggatgaccacgcgggcggcgaacatctggttctcggtagtgtctccgtcgcctccgcaggccagcttgagcaacgccggcagctcacagatgaagtggtccagcaggcggggcgcgcac

SEQ ID NO: 486 - DNA, 2598 bp, Homo sapiens
  misc_feature: Incyte ID No: 130157.2
ctaagcctcaactccagcagtgcctgggaggaaggaagattctgttcattggagattcaaccaacagagggatcatgtactatcttattgaaaggctgaaaaacgttgcaggaatggcagaaagtacatggcactaaattctatcacaacgtcaatggtgggaagactttgatcagttattcctactatccccagttctggataagcccttcattgagaccaacatttgaaaatgcacttgaacacctcttgcaaagatcacgtcccctagagaatactggccagactgtattggttgttggtggtgttcagtggcttaattccaatcacctgcaaattattcacaaagttttgaagagggaaaatttactcaatatcctagtgatcatcaaaactttgggaattggatttcatctgccagtggatggagtacatttcttaacacagagtgaagtacagaacttatggaaagaaaatttgattattctggatactgcaaaaaaacatggctatgaagtagttgacacattcactataacaatggggcgttacaaagagtttctacaggggaagtgtggatgtcatttccatgaggtagtgaaatcaaagttatccaaagaatataactttattaaaatgaaaagatcaagaaatcatatcatgggaagatatttcagcaatcaaagcaaactacaacaaggcactgtaacaaattttcgatcgccatatcatgtcagaggtccaataaatcaggtttgttctgaaatccttctcagcaggatgtgtgcaaataaaaggactatgtaggctccctgcaggagagctgaatctggagctggagacgagctagtcacccggacaatggtctaggagccaagcgctgcacatcgcacacatttgggatcgaccacacacacttgtgcacaccagcacatgcatgcacaccagtacacacacagttaaataatgataacacttcttacagctttatgaattcaagatgtgaccttgaacaccagtccatttcacagtgaaagatatacctagagaaacgttacttgaagcataattattaaccagaaccactgtgggccaggtatggcattatgataataaagagaaatatagacacttaaaattatgtgaaaaaaaggataatgctctttcatgttgtcttaccatatctataggtacatcaatattgaaaaggagaaaaaccaatgacattccactggcaagtagaagttgtcctttcattctttaccaggagaaaatgtgatgtttatgatggcttaggctttgtgaatctaatgcttatgaaaaacatttcttcctatactttttaaattttattactgaaaggaaaagaacaggaatgttccacaagggaatttgaagagattctgtgagagagatatgaaatattttatagttaaaacaccaatatattcaactttacacttcttgtgtttttcataaacattccctcttgtcttatctgtgtacttcgatgggtaactgcagtctgaattaatgaaatatgtaattttaaagtaagtaacaaaatgtagttcctcatgtattactgtactatgtttcattgatgatattacttaaatcttgtgtttgccattacagccctatgtaacttaaaattacaattatattttatgtaaatattttgcaaaggactatgcattctgaaatgcataggtgctttttcccaccaagcatttgcatatgtccacaaatagtattatgttactagtatctatattttgattttcctgagcaactgtatcaaatccaaatttagattagacaaaaaattattattttaattaaactgtggcatacatataatacatacctaattatagtagtgagaactatttcttttatctctttaggttcaaaatggtgaatttctttattatatgaatgctttgttgtgagataacatcacactgttacaatggattttagaggtttgtcttttttgggtggggtgggaagctgagagggttaattcaatacatggctgaaattaccaaatgtataaatacctcattttcactaccatacaagaaaaaaacacctattttgattgatcagttcttttgtatgaatatccacctcctttaaatactctatttttatatatatttttatatgaagataaacatgaatttatatttaactgtcttaaattatatttacataaatgcaaatatcacttgatataaacaatacaaatctgcatcttacagatgataatttttttagaagaatgatacagaattaactttaaaaataaaacttttctaatatacacttaaatgcaaacatcatttttaaattttcagtgatttttttaatgacataaaacgttaccaatgtgtgcagcctctccatcatgttttaacatactgtatactctatagcagtattacagtcagtatttcatataattttctttagacctaactgttaccatctgactgaggttactctggtatttatctcttcgctgctgaaataataatggattttagaaacaattgtaataatatcattaataaatgtcttactagtaac

SEQ ID NO: 487 - DNA, 2349 bp, Homo sapiens
  misc_feature: Incyte ID No: 985824.2c
gacacgcatatggacacatatggacacacatatggacacgtgtggatatgtgtgcgtacacgtcgtctgggacacatgcctgccactcggggcccagctgccctctgtgtttgtccttgccacagtcacggggtgcatgtgcagaggggagcagaccactggggacgtgctgtgccctgcacgtgcccgggggaagcggaagctgcagctggggtgggggcagcacctctatgcttcatctctgtgggtggcaggagacaaaagcacagggtactatcttggctcctgggagcgactcttgctacccacccccacccatccccttccccttggtgttgacctttgacctgggggttcccagagccctgtagccctcgacccggagcagcctctcggaagccggagtgggcagttgctggcgattctgagaaaacttggccgcatccaccggggccctgcctccagtcggccgctgccgagtctctgcgttctggccgcttcccggcttaatgaatgccagccatttaatcattgctcctgccaccacaaatagatgagcagttaaataaaactcaacttggcataattcaaggcaaataccactctgtgcattttcttaagaggacatgagctgtgtgaatttttagccagcctttggaaaagatgggttacagggtaactcaaccctggctgccatccttgggcactgtgtgtgtccagggcaccttggaggaccgtgcagcccccagaagcttccagctcccgcaccactcagtgaagcccagcctggcgcctgccctgcccccgtcacgggatgggcccccattggggttcaacattccatcgcagccaaaggcagtcggcacttgggacatctgcttccacggacaggtcacctccgctttgcatggaagaatctggatgcttacattaaactggtgttctgagagttcctacggacaggtcacctccgctttccatagaagaatctggacgcttacattaaactgatgttctgagaattcctacaggcaggactgaaagcctggtgtgtgccagtatgatgttccacccacggaaacctggtcacaatcgtcccttccagcaccccatccagcagtgactgcacacactgagcctcctaccagcccctttcaccctgctgactgtcactgggccctgggatgtgcaagactccacagcagcagaggtggggggacatatcacagcctctgcccccggctgtgatgccaccgaggggctcgcctgctgatggcttcaacagggtctcacctcatcttttcctgctctttggccctggatcgagaaaatttccatcagtgccccattaatatgctgccctgtggcatctgcccaggaggccctgccaggcgtgcacaggtgtgcattggtgtaccctggcatgcacaggtgtgcactgatgtgccctggcatccattggtgtaccctggtgtgcctgccataggaccctgggcgggagctcccatctcatctacatctcctgattcatgcgttgtttcataggtttcaatgtctctgtaaatgtggtagaaatgcaggctttatgggcataaagtgtacatttctaaataaatcccttctatttagtatgctcaccctagaagttactgttgtccagacgtagagggatgagtgagccagtgacctcagacgggatggtggggacggcaggtccagctcctgcctcctcctggggggtctggctttgggggcttgctccgaagaggccatggcccaggcctgtggcctcacaatggggaccaaccagctcttctcatcttcttccctcacacttcctctcactcaaataagaaccttccaaaaatgtgtccacctgggcccctgccctgggactcatggatttggagttgtggccacacggttgagggctgcagtgtccagtggaatggggcaattgcgggcctgggggcccttggcctgtccgtggcgggagcatctgcaaggaggagccccagagtccagggagcactgtggggagctccttagagctgaactcacccggcgtcaactcatcaaccctccacccatggacaggggtgcccccagcacaggagaggactcagccctctgcccccacgcacggtgggtgcctgtcaccctgtcctgcccagcggcccgagggcagcagtgggtgtgagggcagcccccggcctcccaagagcagctgagaggatccctgcgggaatccgggcttcgggtgcatgcgatctgatctgagttgtttctgacagtgacagagtgacaatctataagtatctcaagatcaaatggttaaataaaacataa

SEQ ID NO: 488 - DNA, 2064 bp, Homo sapiens
  misc_feature: Incyte ID No: 233089.1
gctgagtatgctagtaataaatgggagtcatatatgactttgttcagatgaccttattttttcataattttgtagcttgttgctatccatgaacatacgcatccctcagtagacagtttcctttactgtgtgcatttttactgtacactgtatagagtagagtatctgttaagtaaaatatatatgtaaatttatgtcttcgtgttctgaatgttagatggaaaagcagaggagcaacactacactgtactgacccctgggaaaataaaatgattaatgtacctaggctgtcactttttcaaggatatacacatctgtgtttttatatatgtgtggtatgaaaatttgaaacctcctgttgtctccaaaagggtcttggtgaccactatatcaaggattttgtttgctgaggtaaagacaatttctcaatatagaaactattcactaagaacttaaaaccatcaggattctagatttacttagctataagaagttaaatcccacgttctgataatctttattcttctacatgttttcctggaatgatgtgtcaaaccagggtcatttttaagttcatataattttctttcataataatgaggacttcctttttctaggttattgttatatttctagtaacactgaaggtaaaataagcttataaaagaaggaaaacatcagaatggtgtatctagaatacacaatcttgctccttactcctccatcatctctaatgaaatttttcttgatgtctgtggctcagtcagtatatattttgaaagattcattgtggtgaatattttgagtcctgacagtttaaacgtgatagagggaacaaaggatttatatattttttgtacaaagttttttcttaaactgtataattttgtaaataatttgtttgggttttttttttgtgtactaaaactaccagcgtatagatttcaataagaattgttgtatttttgtatttggaaactgaaaattacagtaaataaatggaactctaagaaaaatttcagtagacagttcaacagaatgagattccttttcatatgatttttttgacctcaaaatggacatcttatttcactctcagtaaaaagttgaaaatttgactttttagtattgggggcagaagatagaagtgtgttaaagtgaaaaacagttttttcagtaaggtttgaggccctttctataagttttcagtacaccttaaacaggactaaaaatactttaaaagtgtgctttcaaagaattttaaaacatgtttgactcaaagatgaatttgaagtgagttaattataatactggaaaacttcaggttagcataaaatagtttatatatatcccctgcccccctttgggatttacttccaccatcaaatcttcaactgttagaatttcacttaaaagtgaataactgccatacatgttttcttggcatcttcatttacagaaataacatacagcatctaaagcaagttctgtccctcttaatgtgtatgacatctttttaagtagctgatcagcaataatagccaccagttgactaggtcagcctgatatactagtggatcactgtccaagataaaaaggtaaccccaagtattgcaaaatttccctcaatttctttatgtaacattgaagaaatgttgttaccagctaagatgataaattggaaaacagtcttgttaaggtgaaaggggtccttggtgatggatcattatttcaaaaaagaaaaaaatcatgtgaaaaggaatagtggttcctcttgatgtatagtatgcctgtattatagtttttacaaaattgtgaacttgtgtaatagtataataggagatattgttgaatttctaactgtttatacatttaaattcatatatgtaatgtttgttttatcaattacaatctgaatttctaagaagcatgttgacttttgcaataaagatgcaatatggaatggttcacaattggaaaaaaaaaagaaaaaagatgaaagtattacaaatttaaaagaatttggaaaatttatgaaccattccaaaaattataacaatcacc

SEQ ID NO: 489 - DNA, 3705 bp, Homo sapiens
  misc_feature: Incyte ID No: 336256.10
gaaccagaccccagttcgccgactaagcagaagaaagatcaaaaaccggaaaagaggagaagagcaaacaggcactttgaggaacaatcccctttaactccaagccgacagcggtctaggaattcaagttcagtgcctaccgaagacaaaggcgccccgagggagtggcggtgcgaccccagggcgtgggcccggccgcggagcccacactgcccggctgacccggtggtctcggaccatgtctcccgccccaagaccctcccgttgtctcctgctccccctgctcacgctcggcaccgcgctcgcctccctcggctcggcccaaagcagcagcttcagccccgaagcctggctacagcaatatggctacctgcctcccggggacctacgtacccacacacagcgctcaccccagtcactctcagcggccatcgctgccatgcagaagttttacggcttgcaagtaacaggcaaagctgatgcagacaccatgaaggccatgaggcgcccccgatgtggtgttccagacaagtttggggctgagatcaaggccaatgttcgaaggaagcgctacgccatccagggtctcaaatggcaacataatgaaatcactttctgcatccagaattacacccccaaggtgggcgagtatgccacatacgaggccattcgcaaggcgttccgcgtgtgggagagtgccacaccactgcgcttccgcgaggtgccctatgcctacatccgtgagggccatgagaagcaggccgacatcatgatcttctttgccgagggcttccatggcgacagcacgcccttcgatggtgagggcggcttcctggcccatgcctacttcccaggccccaacattggaggagacacccactttgactctgccgagccttggactgtcaggaatgaggatctgaatggaaatgacatcttcctggtggctgtgcacgagctgggccatgccctggggctcgagcattccagtgacccctcggccatcatggcacccttttaccagtggatggacacggagaattttgtgctgcccgatgatgaccgccggggcatccagcaactttatgggggcgagtcagggttccccaccaagatgccccctcaacccaggactacctcccggccttctgttcctgataaacccaaaaaccccacctatgggcccaacatctgtgacgggaactttgacaccgtggccatgctccgaggggagatgtttgtcttcaaggagcgctggttctggcgggtgaggaataaccaagtgatggatggatacccaatgcccattggccagttctggcggggcctgcctgcgtccatcaacactgcctacgagaggaaggatggcaaattcgtcttcttcaaaggagacaagcattgggtgtttgatgaggcgtccctggaacctggctaccccaagcacattaaggagctgggccgagggctgcctaccgacaagattgatgctgctctcttctggatgcccaatggaaagacctacttcttccgtggaaacaagtactaccgtttcaacgaagagctcagggcagtggatagcgagtaccccaagaacatcaaagtctgggaagggatccctgagtctcccagagggtcattcatgggcagcgatgaagtcttcacttacttctacaaggggaacaaatactggaaattcaacaaccagaagctgaaggtagaaccgggctaccccaagtcagccctgagggactggatgggctgcccatcgggaggccggccggatgaggggactgaggaggagacggaggtgatcatcattgaggtggacgaggagggcggcggggcggtgagcgcggctgccgtggtgctgcccgtgctgctgctgctcctggtgctggcggtgggccttgcagtcttcttcttcagacgccatgggacccccaggcgactgctctactgccagcgttccctgctggacaaggtctgacgcccaccgccggcccgcccactcctaccacaaggactttgcctctgaaggccagtggcagcaggtggtggtgggtgggctgctcccatcgtcccgagccccctccccgcagcctccttgcttctctctgtcccctggctggcctccttcaccctgaccgcctccctccctcctgccccggcattgcatcttccctagataggtcccctgagggctgagtgggagggcggccctttccagcctctgcccctcaggggaaccctgtagctttgtgtctgtccagccccatctgaatgtgttgggggctctgcacttgaaggcaggaccctcagacctcgctggtaaaggtcaaatggggtcatctgctccttttccatcccctgacataccttaacctctgaactctgacctcaggaggctctgggcactccagccctgaaagccccaggtgtacccaattggcagcctctcactactctttctggctaaaaggaatctaatcttgttgagggtagagaccctgagacagtgtgagggggtggggactgccaagccaccctaagaccttgggaggaaaactcagagagggtcttcgttgctcagtcagtcaagttcctcggagatctgcctctgcctcacctaccccagggaacttccaaggaaggagcctgagccactggggactaagtgggcagaagaaacccttggcagccctgtgcctctcgaatgttagccttggatggggctttcacagttagaagagctgaaaccaggggtgcagctgtcaggtagggtggggccggtgggagaggcccgggtcagagccctgggggtgagcctgaaggccacagagaaagaaccttgcccaaactcaggcagctggggctgaggcccaaaggcagaacagccagagggggcaggaggggaccaaaaaggaaaatgaggacgtgcagcagcattggaaggctggggccgggcaggccaggccaagccaagcagggggccacagggtgggctgtggagctctcaggaagggccctgaggaaggcacacttgctcctgttggtccctgtccttgctgcccaggcagcgtggaggggaagggtagggcagccagagaaaggagcagagaaggcacacaaacgaggaatgaggggcttcacgagaggccacagggcctggctggccacgctgtcccggcctgctcaccatctcagtgaggggcaggagctggggctcgcttaggctgggtccacgcttccctggtgccagcacccctcaagcctgtctcaccagtggcctgccctctcgctcccccacccagcccacccattgaagtctccttgggccaccaaaggtggtggccatggtaccggggacttgggagagtgagacccagtggagggagcaagaggagagggatgtcgggggggtggggcacggggtaggggaaatggggtgaacggtgctggcagttcggctagatttctgtcttgtttgtttttttgttttgtttaatgtatatttttattataattattatatatgaattccattcaaatcgttcctttttgttaacaaggggcatggggaggggtgggggtgggggggcagaggcgtctgaccccaggaacctgcagggcggggctgggtcggtgccctctaaggacaattttgaccttgttcaacctttccacaaagaataaattgtgtttcac

SEQ ID NO: 490 - DNA, 1367 bp, Homo sapiens
  misc_feature: Incyte ID No: 979616.2
caaaaatggccccaggatattccattgaacaaatattgaccattatcttcctaggtgctacaactccatactagtcattacagttagtctttggtttcacaaaaatgttactgcttcaaaggcttggcattaacagtgatgtcagcattcatactgccaacagtctgctggtcatacatggaagactgttaaagtgtggtctgtgcatcattgagcaattgttatgtagacacaaggcctgcttcactcaggatagcttgctcctctcgctgagaagagatacctgaagtctactaagtctactaaatgagatatatatgtgtatgtatatgcctatatatattattatatttactagtgtttgtgataatgttataaaaattaataagattgttttgttttgtatgaatgtacgacaaatcgagttgttcaatgtattgaatgaatgtcttactgtaagcatcagagctgtccaaccatgtgtaaatgtacctggtcttttgatcactgacactactttgctgttcaatctggaatcaactgacctggctctgccattgagaaataactaatttagaacaaaattgttaaattttaaaattgcatttctactagaaatagctttggagagttaattttaggtgcgaataacaggataaatgctatctgatcaagcattcatccgaaaaatgtttttgagaattcactttgtgcaaggcacagctgttggggctggtatatgtgtggacatgtttgatttgaaaaccttcgtggtgtctctgtgtgttattgatcatctgtgtcttttgcttaaaatggcattatttgtaacacaaacctaatatcatatatacaaatatactgtatgtagccaagaacactaaattggtaagacgctttagaaaatatgcatttgaatttgaatatctaatgcctcaagcaaatttattagagtttcagatgaatatatatttttgtaactggcaagtaaatgagtagaacagagctttttgcctaaaaatatttttataagtactcatttacatagtattcattattttaaatgacaaaatatcaaattggttctataaatagtaattgttttgaatatatccatacttaacatcatatgaaatccaaaatttaatgataaatttcatctggatgtgttattataaaagtcatctttttttcctttgtaaaatatccatgtaacatagcttccattactccatattttatgtatggttaaaattatcaaagtgcattatgtattttatattgtttatttttgtctgcatgaaagattggaatagtaaccgtgtatgataaatgttaataataataaagtgaaatgtagtatgacc

SEQ ID NO: 491 - DNA, 5408 bp, Homo sapiens
  misc_feature: Incyte ID No: 351432.3
tggcggctagatcccgggcactggcggccagcgctgacctggttggtggcattgtgttcccaacggcctcttgcacgacctcagcacgggtttccacctctccccaagccacctagtgaccccagaattgactggggaatgcctgtgagcgatgatgacctcacagggaacagctgaccgcagggctgggagaacagctgtgccccttcgaggctggattttagtggagggacacacgccaaagaccccctctctgctgagccccgtttgttgtctcggagcccacccgactctagccgctgaactctgacatgctgaggaaaactgggtggagccctgggggtccccctcagaccccagtctccggaacagggcccactggagtcagccagggtgtggcaggcaggttggttaaccccctccacagacaagaccacagaccgatgctcaacttgcagcagcctctgcctcaccccttaaaggagctgattatagattcccttacgctgcctctctaattgtctcatgattgcattcttgagggctatggaccgagggaaaaggatcccaaacagcactcctcagcaccggaaccagagttgctgctaaacacgtgttaattaactcgtttctatctgaatgcttttgcatacacaagggaaaagaagcaaaaaagtgtattccttatctggaagactttgtgatttcgttgggcaaaaaagaactacacacaaaggtcttgaatgataagtgatgctctgcctagggttcggttcagtgtggaggttccattcaagaggaaggaggccagcacagcgaatctctgtccctctctggaagtggagagcctctaacaagttaccctctcccagatcagctcagggtaccgggcggccagcctccagcccctgtcacccttctcacccactcgccacccgtccctcaggggctttcttggaggcacgggggttattgaggggggcaagagaatctcaaccccgatacgtttatgtttcgacttccccgaatttccttgtgcctgcgttttgctgcctgggatccctagcgtgagaagggctcctttacactcagaggtgccgtaatggagccaagggacggcatcctcggggctcccgagccccgagtggagaagcttggggcagagggacggcgggggcggcccctggtgccgggctgtgcctggaagcgcgcccccgccccggccccccgtcccgcctccccacccgcgaaggcgggaccgcgcacggtgcgccggggggcgcgcacgcagggggctggcctgccgcggcgcgggggaaagttgagttgggagaagttgggagcggcgggggcgcgccccggggtgggcacggggcagtcgtcgggagcgcgcgagtgcgccggaggacggggagagaccccgagacccccggggcacgaagtccagagcgagcgggttatgcctccgcctcgttgccctgaaagccgcagcgacagcgaaaagggctaagattcggccatgagcagcgcccctcggcgccccgccaagggcgcagattctttctgtacgccagagccagagagcttgggccctgggacgcctgggttccccgagcaggaggaagacgaacttcaccgcaccctgggcgtggagcggtttgaggagatcctacaggaggccgggtctcgtggaggggaggagccaggccgcagctatggggaggaagactttgagtaccaccgccagtcctcccaccacatccatcacccactgtccacccacctgcctccggatgcacgccgccgcaagacaccccagggcccaggacggaagcctcgaaggcgcccgggagcctccccgactggagaaaccccgaccattgaggagggggaggaagatgaggatgaggccagcgaggctgagggggcccgggctctcactcagccgtcccctgtctccacaccctcctcggtgcagttctttctccaagaggatgacagtgctgaccggaaggcagagaggaccagtccatcttcccctgcaccactgccccaccaggaggcgactcctcgggcctccaaaggggcccaggctggaacccaggtggaggaggcggaggcggaggcggtggcggtggccagtggcacagcagggggtgacgacgggggtgcctcggggcgccccctgcccaaagcccagcctgggcaccgcagctacaaccttcaggagaggaggcgcatcgggagcatgactggggctgagcaggcactgctgccccgggtccccacggatgagattgaggcccagacgctggccacggccgacctagacctcatgaagagtcaccggtttgaggacgttcctggggtgcggcggcacttggtgcggaagaatgccaaaggttccacacagagtggccgagaagggcgggagcctggccccacacctcgggcccgaccccgggccccccacaagccccatgaggtgtttgtggagctgaatgagttgctcctggacaaaaaccaggagccccagtggcgggagacagctcgctggatcaaatttgaagaggacgtggaggaggagaccgagcgctgggggaagccccacgtggcctccctctccttccgcagtctcctggagctccgcaggaccctggcccatggggctgtgctcttggatctggaccagcagaccctgcccggagtggcccaccaggtggtggagcagatggtcatctctgaccagatcaaggccgaggacagggccaacgtgctgcgggctctgctgttgaaacacagccacccaagtgatgagaaggacttctccttcccccgcaacatctcagctggctccctgggctccctgctggggcatcaccatggtcagggggctgagagtgacccccacgtcaccgagcctctcatgggaggtgttcctgagacccggctggaggtggagcgagagcgtgacgtgccgcctccagcaccaccagctggcatcacccgctccaagtccaagcacgagctgaaactgctggagaagattcctgagaatgccgaggccacggtggtccttgtgggctgcgtggagttcctctcccgccccaccatggcctttgtgcggctccgggaggctgtggagttggacgcagtgttggaggtgccggtgcctgtgcgtttcctcttcctgctgctgggcccgagtagtgccaacatggactaccacgagatcggccgctccatctccaccctcatgtcagacaagcaattccacgaggcagcctacctggctgacgagcgggaggacctgctgacggccatcaacgccttcctggactgcagcgtggtgctgccgccttcagaagtgcagggcgaggagctgctgcgctctgtggcccacttccagcgccagatgctcaagaagcgagaggagcagggccggctgctacctacaggggctgggctggagcccaaatctgcccaagataaggcgctcctgcagatggtagaggcggcaggggcagctgaagatgatccccttcggcggacggggcggccctttggggggctgatccgagatgtgcggcgccgctatccccactacctgagtgacttccgagatgcacttgaccctcagtgcctggccgcagtcatcttcatctactttgccgccctgtctcctgccatcacctttggggggctgctgggagagaagacgcaggacctgataggggtgtcggagctgattatgtccacagcgctccagggcgtggtcttctgtctgctgggtgcccagcccctgttggtgatcggcttctcagggcccctgctggtctttgaggaggccttcttctcgttctgtagcagcaaccacctggagtacctggtgggccgtgtgtggatcggcttctggctggtgttcctggccctgctcatggtggccctggaggggagcttcctggtccgcttcgtctcccgcttcacccaggagatcttcgccttcttgatctcactcatcttcatctatgagaccttctacaagctggtgaagatcttccaggagcaccccctgcatggctgctcagcctccaacagctcagaggtggacggcggtgagaacatgacatgggccggggcaagacccacgctggggccgggcaacaggagcttggctgggcagtctgggcaggggaagccccggggccagcccaacacggccctgctgtcgctggtgctcatggccggcaccttcttcatcgccttcttcctgcgcaaattcaagaacagccggttctttcctggccggatccggcgggtgattggggactttggggtgcccatcgccatcctcatcatggtgcttgtggattacagtattgaggacacctatacccagaagctgagcgttcccagtggattctcggtgactgccccagaaaagaggggctgggtcatcaaccccctgggagagaagagccccttccctgtgtggatgatggttgccagcctgctgcccgccatcctggtcttcattctcatcttcatggagacacagatcaccacgctcatcatctccaagaaggagcgcatgctgcagaagggctccggcttccacctggacctgctgctcatcgtggccatgggcggcatctgtgccctctttggcctgccctggttggctgctgccactgtccgctctgtcactcacgccaacgcgctcactgtcatgagcaaggctgtggcacctggggacaagcccaagattcaggaagtcaaggagcagcgggtgacggggctgctggttgccctgcttgtgggcctctccatagttatcggggatctgctccggcagatccccctgggccgtgctctttggaattttcctgtacatgggagtcacctcccttaacgggatccagttctatgagcggctgcatctgctgctcatgccgcccaaacaccacccagatgtcacttacgtcaagaaggtccggaccctccgtatgcacctgttcacggccctgcagctgctctgcctggccctgctctgggccgtcatgtccacagctgcctccctggccttccccttcatcctcatcctcacagtgccgctccgcatggtggtgctcacccgtatcttcaccgaccgagagatgaaatgtctggatgctaacgaggcagagccggtgtttgatgagcgggagggtgtggacgagtacaatgagatgcccatgcctgtgtagccgccaccgagggacagccgagggaccgatggacgaggggacaggctggtgggatggggttccccctcccatgcccctccctcctttttatttaagtgaataatttaaagtcttctcctcccccactgcccctgcagtaaagtgctttggcccccaaaaaaa

SEQ ID NO: 492 - DNA, 378 bp, Homo sapiens
  misc_feature: Incyte ID No: 083495.1
tgaagatatatcttggaagtagcagagtgcatatttgagtcagtttttttttctgacttcaaagtcttaagccaccaatgatctgttttttcttatcttccatcttcatcctttttttggtcttttctcaagcggttggcaattcgtggtattaattgatagtatgtgtctgagtgttggttctttatgatgtaatttcttcagaagcggtagttttgaggtatctgtctttaattgtgggatcctgtaggtgcagacagtatggttctggtaatttaaggcacctcagagcatcaccttttgctgatctgcaggacagaactatgcttggattcttaatgtgtagaaatcaaatgtgctttaataatgtgaaatgat

SEQ ID NO: 493 - DNA, 842 bp, Homo sapiens
  misc_feature: Incyte ID No: 332595.1
  unsure 41, 638: a, t, c, g, or other
gaacagcgccccggggacccccatcctgcaactgcgcgcancgacttggacgtgggggtcaacgggcagatcgaatacgtgttcggggcggccaccgagtcggtgaggcggctgctgcgccttgacgagacgtccggctggctcagcgtcctgcaccggatcgaccgcgaggaggtgaaccagctgcgcttcacggtcatggcccgcgaccgcgggcagccccccaagaccgacaaggccaccgtggtccttaacatcaaagacgagaacgacaacgtgccgtccattgaaatccgcaagattggggcgcatccccctcaaggacggggtggccaacgtggccgaggacgttctggtcgacacccccatcgctctggtgcaggtgtccgaccgagaccaaggcgagaacggggtggtcacctgcaccgtggtgggcgacgtgcccttccagctcaagccagccagcgacaccgagggcgaccagaacaagaaaaagtacttcttgcacacctcgacccctctggactatgaggccacccgggagttcaacgtggtcatcgtggcggtggactcaggcagccccagcctctcgagcaacaactccctgattgtcaaggtgggagacatcaacgacaacncgcccatgttcggccagtcggtggtggaggtttacttccctgagaacaataacattttttctattgaaaatgacacggggaccatttactccacaatgtcttttgaccgggaacatcagaccacatacactttcagagtcaaggctgtggatgggggagatcctcccagatctgccacagctacagtctcgctttttgtgatgg

SEQ ID NO: 494 - DNA, 2192 bp, Homo sapiens
  misc_feature: Incyte ID No: 481251.3
  unsure 25, 933, 939, 941, 945, 955: a, t, c, g, or other
ggctgttgctgtggtttcctgagtngctgctgctgcggcggcggcagcggcgtctgtgcttgtggaggtgtcggcctctgggcggatgttgacattgtgttgttgttattgctgatggtaatggcggcggcggtggcggcgacggtccagaccccatcccctctgtagccggagccgagacagccgacagcgaactccgcggcctcggagccggcggcagcggcgactcccctcagcctccgccgcctcgcccgccggtaccccggcgccaaccccgggagtcaggccctttgggcaggggagctcggaggctcaggatggcggatttcgacgaaatctatgaggaagaggaggacgaggagcgggccctggaggagcagctgctcaagtactcgccggacccggtggtcgtccgcggctccggtcacgtcaccgtatttggactgagcaacaaatttgaatctgaattcccttcttcattaactggaaaagtagctcctgaagaatttaaagccagcatcaacagagttaacagttgtcttaagaagaaccttcctgttaatgtacgttggctactttgtggctgcctttgttgctgctgcacattaggttgcagtatgtggccagttatttgcctcagtaaaagaacacgaagatcgattgagaagttattagaatgggaaaacaataggttataccacaagctgtgcttgcattggagactgagcaaaaggaaatgtgaaacgaataacatgatggaatatgtcatcctcatagaatttttaccaaagacaccgatttttcgaccagattagcatttactttatttatagagactttccaagtatgttgtctttccaatggtgccttgcttggtgctctcctggtggtgacataacattggttctacagaatcgtgtggtgttttttttntttttntntttntttttttttnaaataaccgcatgttctaagtgtgcatttttgtcaatctttgcaacagttatttcatacagatgtttaatacttaagttattgtgctcttttctgttatgtattctgattttcaaggattacttttttgtattatcaaaaaaatacatttgaacttagcataaaaagtggccagccttttttattttgtcaccaaggtacacacagtcctttatttataaattccttaacagagaaaaacacctttgtaaggctcaacttacctattccagcaagcacactttttctgtcattttttctttcttttcaaatttgatattgtcattattttaaaatagtaagttttctttaatagtcttttgggacctaacataccctttctcatacaattcctaatgctctgtttatggcagataatctgtaatgttatgaagacctatcaaaaagttttaaaagtatttctgtcttcaaaggtagtaagacaggattaaatttttattagaatagacaaatcagtgaatggtatgcatgtatctagtggttactagaactcaggatcacacaatatagtagcatcacgatctgtgtatatttttgatcaagatgataataatggccttacttgggtttttatcgtttatcaaatcttacatacaaaagagtggaagtattcctttacaaaatttctaaggaaaatatttcttccaatctatcacaattatagaatggatatatgtttctgaaaagtttttgaaagaaagcaaaagttctagaactaaaagtaagctggtatttaatatcccgttgatatttagaaaagattgttaataagaaatggaggatgcatttagtactatttttatccactagttcactttcagtacagttatgtatacttgttttgattgagagtgtgacatacatgttaaatcagattagcttgtttctttaaatatacatatacacaaatacatataattttttctccttttgttgtgcatatctctatgcatttttaaacttttagatttgtgaatgacctatgtgtaaatttttgtttttataaaccagaaattatacaagttttaatgtgtgtcaacaacttgttccatacaactgtggtatcgagcaataatgttaataacttttggaattatataaactatgcttaataatttgtattgagaattggtaccactatacaatacttttttcctgtattaaatcttttaaatacc

SEQ ID NO: 495 - DNA, 552 bp, Homo sapiens
  misc_feature: Incyte ID No: 025612.1
  unsure 545: a, t, c, g, or other
ggtgtggggtgtagattttccctggaggtgaaggttctcagccctaccctttagcccgcccacccagctccagccgtctgtttctgtctcggatgagagggggcctctcaggacaaagaggaagtagctggaaggggaaggagccagctgcagagaggaggaggtgagctgcagagaagaggaggttggtgtggagcacaggcagcaccgagcctgccccgtgagctgagggcctgcagtctgcggctggaatcaggatagacaccaaggcaggacccccagagatgctgaagcctctttggaaagcagcagtggcccccacatggccatgctccatgccgccccgccgcccgtgggacagacaggctggcacgttgcaggtcctgggagcgctggctgtgctgtggctgggctccgtggctcttatctgcctcctgtggcaagtgccccgtcctcccacctggggccaggtgcagcccaaggacgtgcccaggtcctgggagcatggctccagcccagcttgggagcccctggaagcagaggcnagcaaca

SEQ ID NO: 496 - DNA, 519 bp, Homo sapiens
  misc_feature: Incyte ID No: 096700.1
  unsure 345, 350, 367, 441, 461, 499: a, t, c, g, or other
gaactatgtatagtgcaggggttcttttcagttagaaaaggcaggttgctttaatgttattctgactcgcattgtttgccaacagaaaatattttatacttttgttattaaagcatccagggcaatttaatatttgttcctagatgtaactcatttgaataggttttgcatttgttattcagcagtgtataaagctaaccttgataattttacttttaattaattatctaaatgaaaaatgctattagctgaaccacatccacaacagcacatagagctctagaagagttgaaacatagatcattgaaggttaaaaatcctcttccaaagcagcaagtcaatcantacantaatgatatttggggangggtgggagcccttaagaactattgatgtggccttaaattactgtcatttattatcctaaagaagaaaacatantaaccataatgggctctcanctcaactcccttttttatttagttctatttggaggagntatgtattttttacattagt

SEQ ID NO: 497 - DNA, 1095 bp, Homo sapiens
  misc_feature: Incyte ID No: 230048.1
gaaggatgacagcaaaaacagtgcctctttgtgcacaatccttttaaactagcattcttacttgttagaaatgtagaatgaactttgtttgtaatccttaaattaaaatgtggtaagtaggaagcaagaacttattctgtgtttttacgcagccatacacttactttaatctaactcattctgtggctaggattgatataggaatcaacctatgtgatttgctttaggagaaattaaaaggtatattcttaagatatattatattttgatgctaattctgttctggggagcatcttgtattgtcactgttttgtactaaatcttcaaatattgtctactgtgtaaggcagaaaaatttcttatcatgcaaaaaccattttgtttccagggtaacaagtaactaagtgcatgcacaacttgttttcccttgtaacattcatgatctcatttacaactctgattttaaaacaaaaaaatctttacaacaagctatatagggacataccagatgttgcagtgattttagctatcaacaaactgttaaccatgtacaatatttaaaataggcttattttgatgtatcgcctattatacaaacacacaaaacatttttggaggcctcagttatgagtgacagagctttctgtgtataatttgtctaaataatttgtctaataaaaatgttttctaaacttgctctcatactattgaagtcttaactgtaagatttgaaaatgtttactctctcacagattgaactaaatttttctaaaaatttatcttgagttaattaaagcataaatcacattaagttttactggcagaactatgccaaaatgaatggctctctaaaacattactaagtgatgtcttaaaccaatgagagactgcctttctgctatttgagactatttgaaccaacaatacatttgtttttctctgtggatgtctctgtgagcacttttttgggaaagatttatcctgtttcatgtaagcaatgcaaccattatgataatatcaggatgagggtgtgttacatcaaaaaaaataagaaagacaagaaaattaagggtaattattaaacttaggatttat

SEQ ID NO: 498 - DNA, 1992 bp, Homo sapiens
  misc_feature: Incyte ID No: 073621.3c
tgccaggaggcaaatttgccaagtggccaaattagtggctggtagctgcaacgttgccattacttggagggctgaacctttgctgactgggcaatcccttctccaggagttatgacctgtttttgaggggacacagctatcatgtgaccccctttcacagtcacatactgcgggagtggtgactggctggcagctcctgttgcgggcacgtgaggggcttcaccaggttcctgtttgatgatcacttttgtgaaagctccaagtcctcctgttataggtttggggctttgaaccttagggtgactcccaattgggcaaagaggtggcatagatgcaaacaaagaatcctcctgcttgacagtagatgttacaaaactacttccatgaattttaggaacaggggaacctgttccttgggagatctgagaagccgtggagatcttgtttgtaggacttcctgtactgggagtggtggctccaatcacctgccccggctgcttgtccatgataacataaggattattaataacagagccggcagtgccttgcttcacgtggactggagtggaagtcggggttcgaggcaatggtgatgggcttggagttgatattggggaacctgacacaatcttgcagctcatggtgatgggctggaaggattttccaggtgactcaggattaggaacctgactttgtggaacaattttgcagcttgatgctattggctggaaagctgaattgccatgggaacaaaaggtaactttctgggatgtagtcattttggtgggtgttctttccaatgaagatggcaaagcataaaacggagtgtgtcgttcagcttcagtgctagctgggaatcctgctttctccacagaggtatcgggtactggctcatgtgactgctttattggtgaagaagctttcactggggctggaatggtcaaaggcaaagatggaggggcatcagagatgtcagactccgaggactgaggatagatacagtcttctccgagagaatggcgatggagttcaacatccactaccgtctctgctccaagagtctgcaagccagtataagttctatccagcttcagattatgtatgatatctatccgcttgttctggctgtccttaaaatgaacttgaactctgacgggaaactcaccccagcctcttctggtcaggtgaaaaggaggctctctaacttccacaaggtcatttggtttatagctaggatgaaggaagaaccaaaccttcttgacaaaatgattaatgctgggttctctacgggaccctcggacatataccatccacttatgagttgactggtcattttcttccctcttatccggaggtatatacttggacacattgcccactactattgttttctttacaaaaagtcgtgaagtctcatctgtgagatcagcattccgctgttctgttttatgggagccagtaattctagaagtatcccttccagtatttcggcttggtctctgctccatgttgtttgagagtctttcctctatatccatattgctgttattatctttgtcagataagaagtcattgtgctgagataaagaatcactttctgaatgattggctgatggtgtttctgctctctgattggcaggagatgatgacctagatggtgattccaaaaatttcttgatagcaggatgattaaaaaccattgtatcacatgtctttgatccctcagaaacttttagaagacctgcagaagcatagtagtttgctacaatgcaggcacgcagtttatccatcatccttcttgcttcaatcagtcgctggtcaatgacttcaatttcatgttccttattcttcatttcaagagcaaactgttctttgataatagtctcaatcttctgcacagcagcatctcgagctgtacaaagaacataaaatacatccaaggcctaattaatcagtgactgtctttatttaagtcagcaagcaacaaaagaa

SEQ ID NO: 499 - DNA, 1184 bp, Homo sapiens
  misc_feature: Incyte ID No: 344582.19
gccctctccccgcccatatatgtagggcagcagcaggatgggcttctggacttgggcggcccctccgcaggcggaccgggggcaaaggaggtggcatgtcggtcaggcacagcagggtcctgtgtccgcgctgagccgcgctctccctgctccagcaaggaccatgagggcgctggaggggccaggcctgtcgctgctgtgcctggtgttggcgctgcctgccctgctgccggtgccggctgtacgcggagtggcagaaacacccacctacccctggcgggacgcagagacaggggagcggctggtgtgcgcccagtgccccccaggcacctttgtgcagcggccgtgccgccgagaacagccccacgacgtgtggcccgtgtccaccgcgccactacacgcagttctggaactacctggagcgctgccgctactgcaacgtcctctgcggggagcgtgaggaggaggcacgggcttgccacgccacccacaaccgcgcctgccgctgccgcaccggcttcttcgcgcacgctggtttctgcttggagcacgcatcgtgtccacctggtgccggcgtgattgccccgggcacccccagccagaacacgcagtgccagccgtgccccccaggcaccttctcagccagcagctccagctcagagcagtgccagccccaccgcaactgcacggccctgggcctggccctcaatgtgccaggctcttcctcccatgacacgctgtgcaccagctgcactggcttccccctcagcaccagggtaccaggagctgaggagtgtgagcgtgccgtcatcgactttgtggctttccaggacatctccatcaagaggctgcagcggctgctgcaggccctcgaggccccggagggctggggtccgacaccaagggcgggccgcgcggccttgcagctgaagctgcgtcggcggctcacggagctcctgggggcgcaggacggggcgctgctggtgcggctgctgcaggcgctgcgcgtggccaggatgcccgggctggagcggagcgtccgtgagcgcttcctccctgtgcactgatcctggccccctcttatttattctacatccttggcaccccacttgcactgaaagaggcttttttttaaatagaagaaatgaggtttcttaaagcttatttttataaagctttttcat

SEQ ID NO: 500 - DNA, 722 bp, Homo sapiens
  misc_feature: Incyte ID No: 997526.4
aaaaaagaagaacatgtcggcctaccaggtgttctgtaaagagtatcgcgtgaccattgtggctgaccatccaggtatagattttggggaacttagtaaaaaactggctgaggtgtggaagcaattaccagaaaaagacaaactgatttggaagcaaaaagctcagtatctgcagcacaaacagaacaaagcagaagccacaactgtgaaaaggaaagcatccagctcagaaggttccatgaaagtcaaagcctcttctgtaggagtactgtcaccccagaagaagtccccacccaccaccatgctgttaccagcctcaccagccaaagcccctgagacagagcccattgatgttgctgctcatcttcagctgttgggagagtccctaagcctcattggacaccgtctgcaggaaactgaggtgaatacaactatcagcagcatgactacagtttcccatatagtttcccatataattttgattcattcactcattttacatacatgtattgagcatctactttatgctaaattatgccaggttctcaggatgccgtaacatagaagatataatgataataacagaaatatctatagagatattcagtctacctgttagctctcaaagtttcactaatgatatcctattgaaacaatggcacaaaaagaaattggagtaccctgtaacttatttttatttttttaaaatgcagtggaggctg

SEQ ID NO: 501 - DNA, 2926 bp, Homo sapiens
  misc_feature: Incyte ID No: 997526.1
  unsure 869-901, 1902-1956: a, t, c, g, or other
agaaccacatagacattatattgagccagaggtttaatctgtgattttacatttcaacttagagtgatctaaaaatcagtgccgagatttgaccattagcattgaggaatgtttatagtcctttactaagatattaatgtagtcagctgtctgaagtcagttcggtgacccccagcttaaaagttagcattaaccctctgtctgcccgcctctcactattgcctttcttttctccattttgttctttcatgactgcttttccttttacattttgtccttcttaatttaatttaatgttcactgatgtgattgcagatttggaagcaaaaagctcagtatctgcagcacaaacagaacaaagcagaagccacaactgtgaaaaggaaagcatccagctcagaaggttccatgaaagtcaaagcctcttctgtaggagtactgtcaccccagaagaagtccccacccaccaccatgctgttaccagcctcaccagccaaagcccctgagacagagcccattgatgttgctgctcatcttcagctgttgggagagtccctaagcctcattggacaccgtctgcaggaaactgagggtatggtggctgtgtctggcagtttgtcagtgcttctggattccattatctgtgcccttggccccttggcatgtctcaccacacaactacctgaattgaatggctgtcccaaacaggtcttgtcaaacacattagacaacattgcttacatcatgccgggactgtgacagcaaagaatcctgggacagaaaccttatcctacaccattgctggtttgtgtatatatgactgttgcagattccttcagtggcctctggctgtaggttttaaatttttnnnnnnnnnnnnnnnnnnnnnnnnnnnnnnnnnatgtacaatatatacatagactgtaactactttgcttttaataattttatgaaatggcaaaggtttagccaagaggaaattttggcatgaatacaggcttgggattcttttttctcctgtggtggataaatctgccttaaaaatcaatgtaacttgggggctgggggcttgttctgggtgccaagcgcatctctttatggacagctaaaatgtgattattttccaagctcagttggacctccagacccatcactgaccatttgccttacctgtcttagtctgaaatgtaataggaaagataacgggaagatgccagttgactgaaaattcaaagcctttcaatttgaagtgacctaggtgggaggtgataaaatttgttccctttatagttacggaggtggcttaggtgaattgagtagagggttcattccaattcctactgtataggtgtctgtgtctcaaaatttattgtaatcattgggtaccattggtggcctcaacagaggccaaggagttctgtgagccctggcagcaaaaaacaccttggggggtgaagctgtcaatgccaccagttggacctccatacattctgagctaacccagaatctttagtcggcagaattaagtgctggtgtctttcactggcagcatgaagttagccaccaagtcctcacaagccgtgctgcttagttgctcggtggttatggataaactttgcccagcatgatttttgggttcatcttatcagttcccctggtgggcagatacacagtgttctgcattccacatgtaagtgaattgcaaaaacaaaacaaaactcactctcttgtaggtttatttatgtgtgtgtgaatgtgtattttaattatgtgtatttaactctttaaaatctcttagattttaatttatcctgtaaatttctgtatatataatttaataacagaagcctccaccagcaacagcatgtggaagatacagatttgtcatttctcccttccgcnnnnnnnnnnnnnnnnnnnnnnnnnnnnnnnnnnnnnnnnnnnnnnnnnnnnnnncctggtctgttccaaaaactctgaatcatctacattttaaggtattttacctcaaaaatgaatcattgtgttaggattctaattctttataaagaacttcatgggcttcaataatgtctagaaagtaaaataaagaggaatgttaccatccccagctgcccttatttccagagaaccagacgtttgtttcccagttggaaagaagacagttgagcacttcaggatggtttttaaatttggtatgagattctctgccaacaccaagctctgagttaactgtgctttcttctcctggccctgacagagcactacagcatcaaagtaaatctttggggacagtgtagcccatctgcatcctatttaatttcttcccttctccccaccagtgttgtcacagggctatgttgcttaaaggtagtctggctgctgaatccctttctcagctcagagcagttttaagatttaattgggaatacagagaaacaggattgtttgagaaccaaaatcaagaggaacagaaatcttaacttgatttcatgtgttagaacattgtaccatgcctcttctgtatctgtggaagtttcctgtttgacacagggtatctaggaggggcggggaagacatggatagtataggaagacattaatcctagcattgtcatttatatacattaatgaaatcctgatgaggacctgctttttgtttgttttcctttgaaacccagccctattgtatttgtatttaaaatttgtacacatttgtataataatctgtaccttgtggtatttggtactattagaggaaaaactttggattcagaccttcttgcagtttttatatcattgttttattttgttttttaaataaattctagtggtttgatccaaatcccattacagttgtataaagaaataaaattttgtacttatattattaaaaatcacatttttaatatttgtaaaaaaaaaaa
